United States Patent Application Publication US 2026/0258423 A1 - sequence listing, part 53

SEQ ID NO: 301568 - DNA, 83257441 bp, Homo sapiens (residues 29,887,299-32,022,105 of 83,257,441)
  source 1..83257441: mol_type = genomic DNA
aaattatttagtgaggatcaatagaggataaacttgagctttagtaagaataaacaaaaacaaaacagagtactttaggtgtatttcctaggtcctatttcctagacccatcaaaaatgacatggaattcaagactggagtttaagacaagaagggtaaggcaggccaatctttggtacgtgctttcaagacaagggtctctgaagtcggattgcctggattctaatcctgtcctaccccttatctgtgcctctatttcctcatctgtaaaatgaggatggtaatagtacacatcttcagagggtggttgtcaggactgaatcagatcatattgataaagagttcagaatagtgcctagcacagagtaagccaatgttggttgttcttatttctttctctttgaagagcagaaacctggtcatcatagtagagggaacagagctacttttaaatggtcttctgcagttcaggttagggaatgctattactaaatactaattttagaaaataaataagtgctttcagcttattttaatgtaatttaatgtgaagaaaacatttccttatcttttataaaaactaagatgaccttacagaacacaatatagtttttgcagattagtatatgtgaagattatgaaagaaactatgctgaggccaggcgtggtaactcatgactgcaatcccagcactttgggaggccaatactggaggatcacttaagcccaggagtttgagaccagcctgggcaatgtagtgagatctcatttctacaaaaaaatttaaaagttagccaggcatagtggtacatgcctgtagtcccagctactcaggaggctgaggcaggagaattacttgagcccagaaggttgaggctgcagtgagccatgatcatgccactgcattccagcctgaccgaaagagtaagaccctgtcccatccaccctacccccagaaagaaactatgctgagacagagactgcacttgactctaccatggaaactaacagatagtggtgagaaaaagcctaaaatcacgaagtctaagactgaggaatctttatggttccattggatggttggaaagagatttggagagaatcaggcattcagtgtatttctttcccactgaaatcccaagaaagcagagttggagttttatgtatgagacttagtgccatagcatggacagcttggaaactggacaactctctgggatggaatccgtataagtgtaaagcaaaaacctagtaatttttatagaccaaatattttgatggtttatatttctacagtattaacagcaaccttaaccatacaaacagtagaaaaagtcagtataaagaaagtgacagccagctgcaatggctatgcctgtaatcccagccctttgagaggctgaggtgggaggatcactttaggccaggagtgtgagaccagcctgggtaacatggcaaaatcacatccctacaaaaaacttaaaaaaaaaaaaaaagccaggcgtggtggcacactcctgtagaccagctactcaggaggctgaggtgggaggatcacttgagctcggagggttgaagccatgatagtgcaccacttcactccagcctaggtgaaagagtgagacactatctcaaaaaaaaaaaaaaaaaaaaaaaaaaggaaagaaaagaaaaaaagactactatgtttctaatttaaaataaaattaaaggcattgtatataaaatttgagtttagttttcttaaaaaaaaatggtgctaagacacctgcaaagccacatgcaaacaaataccatatacaaaaatttactcaaaatggatcaaaggcctaaatgtaagagaaaaatcataaaactgtcagaagagtctgggcatgggggctcacacttgtaatcccagcactttggggggccaaggcaggtggatcacttgaggtcaggaatttgaaaccagcctggccaacatggtaaaaccccgtctctactaaaatacaaaaattagctgggcatggtggcacacacctgtaatcctagctacttgggaggctgaggcagaagaattgcttgaacctgggaggcagaggttgcagtgagctgatattgcgccactgcactccggcctgggtgacagagacagactgtctcaaaacaaacaaacaaaaaaccaaaaaactctcagaagaaaacataggggtaaatcttcatgatgtaggatttgccaaagaattcttagctatgacaccaaaagcatgaacaacaacaacaaaataggtacactgaacttcaccaaatttaaaaattttgtgcttcagagtacaccataaagaaagaaaaaagacaacccagagaatgggataaaatatttgcaaatcacatatccgacatgggacttgtatctggaatacataaagaactcttacaactcaataataaaaagacaaaaagtccaatttaaaaatgagcaaaggccagcctgggcaacacagtgaggccccatctctaccaaaaaaaaaaaaaaaaaaaaaaaaaaccagccaggtatgagatcagacaccaagactggggcaggaggatggcttgagcccaggagtgtgaggctgcagtgagctgtgattgtttcactacactccagcctgggaaacagagcaagaccccagtctctaaaaaatttttttaattaaaaaaataaaaaatgggcaaaagatctgaatagatatttctcatgtgaggaagatacacaaatggccagtgagcacatgaaaagatgttcaacatcattagccactagggaaatgcaaacccaaactgcaatgagataatacttcatattcacaagaatggctagaatctgaagttaggttacaacaagtgttgatgaggatgtggagtaatcagagccctcatacactgctggtgggaatgtaaaatggtgcagctgctgtggaaaacaatctggcagttcatcagttaaaaagagttatcatatgctctagcaatcccactcctaggtatatgcccaagagaaatgaaaacatatgtccatacagaaacttgtacacagatgtgtacagcaccattcataatagccaaaagacagaaacaacctaaatgtcatcatttaggtggatgaaaggataaaacactattattatttggccataaaaaggaatgaagtgctaacacaggctatgacatggataagccttgaaaacattatgctaactgaaagaagccaatcacaaagacaacatatgatcccactcataggccagtccagaatagggaagttatagagacagagattagtgtttgcttaggatgaggtgaggtgttgggtgggatagagtggtcatagataaaggggtttctttctgaggtgatgaaaattttcaaaaactgactgtggtgttgggtgcatatatctgtgaatataccaaaaccaatgtattaactgtatagcatttgaattatatttcactaaagctgttcgctctgtcaccaggctggagcgctgtggtgcgatctcggctcactgcaacctctgcctcctgtgttcaagtgattttcctgcctcagcctcccgagtagctgggactacaggcacacgccaccagacccagctaatttttgtatttttagtagagacggggtttcatcatgttggccaggatggtcttgatctcttgacctcgtgatctgcctgcctcagcctcccaaagtgctgggattacaggtgtgagccaccacgcccggtctgaaaaaaatctttaaaagatcatcctgtgagaagcacctgaacatacactcctctgatttgggttctaaccatggacacttttgctacagtcagtgtaaggaccagcctggatcaggcctaatcacaggctggattccctgcaccagtacttttcatatgttagtacttaacagaatcacccaagagcctgttaaaaaacacacagtcctgactatctcaagagagactgagtaggacagagatgaaacccacaaatctactatgcttaagttcccacatgaatctagtgcaagtggttagcaaccacatttgctacaaatagttctctgcactgttatctagacaaaacccatcagatttagccttcacttctaaataaatttttttttcaaagcaatgaaagaaagaagcaacaaaagcacagatttattgaaacgaaagtacactccatagagtgaaagcaggctcaagcaagcagctcaagagccctaaataaattctaaattctaaaatgttgaatattatgtcatagtaatagaaaaaaaaaaacaaaatagccttcaaacttctgacaggtgaagagcagaccaaaggtaattgcagaatttccagacttctcatttgaccaaaagggctattcaattatagacaaaagaaacataattagctaaaaaagtacagagcagaaccgcatcattatatagtgacccactataaatcaaaaggtctcagtacagaccacaccactaagaatatttaatcttgcacaattttatggttataagtcagaaccttatgttctgactagcccattagctttccagattctagttaaaacccatcttcaaactgaagagattttgtataaacaatatatagctgaagatatctaccactaagaaagaagctttataaaattaggaaaatggcttttagaatttacaaaagaaattctaaaatgcacaaatgaagtaatagccgactttcttttttttttctttcttttctttctttctttttttattaaaaagagacaaggtcttgttctgttgcccaggttggccttgacctccttgggctcaagcaatcctcctgccttatagtctcccaagtagctggggactacagacatgtgccacagcatttggctaatagcaaacattttaaatagtaaatacatataaattaaaaacatctgaaagtttccaaagcagcccccacccccacctcacctataaaaggaattctaagtgcagaaaagatgccccaaagtttataaactgcttccctggtgtggatgagggtgttgctctttagaccttcaggttatttactcttaattcctgaaaagtctggttttctagttggaagcagataggaaacagcaaagtaaaagtaaaagctgctagaggaaggcacaatgacagtagggaatgtcaacagccaccactgtgacaatgaagaggaagattcagtaaagctatacaaagtagacccaagttggtctgaaggttgtgggtcactgttaagctcattaacattgtctcgaccatgactgactagcttaaattttttttttgtaaattaaaataaaataaaaagtagacaaaaacaataaacataacaatcttactaggaaaagaagttcctaagggcatttctgtactagagctcactgtaatattatccaaccttccaaatctctctctctctgtcctctggaacctctctcctcccatttcctccagaaacttgctccatgaatcattccctcttccctaccctcttcccgtacccttttctttcctaatgatcacttcccctcagcagaaaaatattctcagatctcttccaaataaccaaaaagagcccttctctcaccctaaatttccctctagctactcttcctttccttgatactaggttttaaaagaacagtctctacttgctactttcctttcctcaccactaatttaccttctaacctgctgcaactggtcttctgatcacccactccaccaaagttgatcttacgaaagtcactagtatcctaactgccaaagtcaatggactttctactcttccttctcttcacctcctcaatacatctgacccaacagtgcacacttccttcctgaaactccctctttgcttagagtctgtgatgccacactcaccagaatttcatcctaactagagtacctagtcctggaatgtcaatggaatttaggcaaaaaaaaagggggggtgggggagaattgctatagtctgaatgcatccccccaaaattgatatgctgaaacttaatcaccaacatgatagtattaagaggtcaggccttcaggaagtaagtcatgaggatagagctctcgtgaatggaattaatgaccttatacaagaagtgccatataactgttcacccgttttccccttttgctatatgaggacaccacatttgttccttctacatgaggatgcagcaagaaggcttttcccagacaccgaatctgctggcaccttgtcttggacttcccatcctccagaactgtgagaaataaatttctattatttataaattacccattctgtggtattttgttatagtagcaggaatgagactatgacaagggtacatgatcaaatacttttgggaaatgtggtattaaagttaagtatttttctttactacagattttctcagatcttcaatatactgaggtgtattgtgactctacaagatgagtttctccaatgttttcccaaatttcttgactattaaattcttccatcccttttaaagaactatcttaaataacaaattgagttgggaaacacattttgggttaacattgctcttgatgttctttttcagtcttatttgcaggattttccttcattagtctcccaaatgtcccattccccaaaagtctatctttaggcttctctcatctcacaccttagtcaccttttagttctccacttgtctcatgttacgttctccataagtgatctcattcatatcctcatggcttcagtacagctttagagcctataagtttctctgccacttactgtgtaagcttggatcttggtttcttaatttataaaatgagaataataataattcctaagtactaaatgacatatataaagtttctgccacagtacctgacatatttatgcaaaggctcaataaatggtcactatcattttttctttctccagcctagatctccttgctgagtaacacatgtatctcttcagcttgggactttcctttgcttgttttgtatatagtcatctcttggtatccacagaggattgattccaggacccctacagatatcaaaatccacagatgcccaagtccctgttataacatggcatagtatttgcatataagctatgcacatgctcctgtacactttaaatcatctctagattacttacgatacctacttcgatgtaaatactatgtaaatagctgttatactattttttaatttgtattatttttattatggtattgttatttttattggggttttcccaaatagtttcaatccacagttggttgaatctgcagatgcagaacttccagctacaaaggactaactatttacctccaactcaagatgttcaccacccactcccaccacttaaactggccccagtattctttacctcagggtatggaaccacaatctacctagatgcctaaatctggaacactgaagccatattctagacccttccttctcaattaccatccttccaccttcccccaattaagtaactaagtacatctagctccacccccgcccccccaatacagcttcagatgtgcaaatctgatcatacttaaattcttccatattcctcatggttttcaagacaaaattcaaactgctatcacataaggctcttcatgatctagcctcttgagtctcatctcccatcatgccccttctctgacatagactctccactccaaccacataaaatcacatgtatttctacaaatggctatgctgtcatgttttcatatattctatttatagatagatgtattttatacattctattttatttatagatcgcagaatgtataaaatacattatacatatattttatatacattatattatatattatatatattttataaatacattttatatatacattatatatacattttatatatgaaatatataaaatatattttatatatacattttatatatgaaatatataaaatatattttatatatacattttatatatgaaatatataaaatatattttatatatacattttatatatgaaatatataaaatatattttatatatacattttatatatgaaatatataaaatatattttatatatacattttatatatgaaatatataaaatatattttatatatacattttatatatgaaatatataaaatatattttatatatacattttatatatgaaatatataaaatatattttatatatacattttatatatgaaatatataaaatatattttatatatacattttatatatgaaatatataaaatatattttatatacacattttatatatgaaatatataaaatatattttatatacacattttatatatgaaatatataaaatatattttatatacacatttcatatataaaatgtattttatatacacatttcatgtataaaatgtattttatatacacatttcatgtataaaatgtattttatatacacatttcatgtataaaatgtattttatatacacatttcatgtataaaatgtattttatatacacatttcatgtataaaatgtattttatatacacatttcatgtataaaatgtattttatatacacatttcatgtataaaatgtattttatatacacatttcatgtataaaatgtattttatatacacatttcatgtataaaatgtattttatatacacatttcatgtataaaatgtattttatatacacatttcatgtataaaatgtattttatatacacatttcatgtataaaatgtattttatatacacatttcatgtataaaatgtattttatatacacatttcatgtataaaatgtattttatatacacatttcatgtataaaatgtattttatatacacatttcatgtataaaatgtattttatatacacatttcatgtataaaatgtattttatatacacatttcatgtataaaatgtattttatatacacatttcatgtataaaatgtattttatatacacatttcatgtataaaatgtattttatatacacatttcatgtataaaatgtattttatatatacatttcatgtataaaatatataaaatatattttataaaaatattgcatagcttatatgcaaatactatgccatgttataacaggcacttgggcatctgtagattttggtattttataaaatatattttattttaaatatattttggcattttataaaatacattataaaatgtattttatacattcttttatctatatggtccattcaatcccattcccactttattgctggtctttttcatttcattttaattacatgatattctaatcctatcctttaaattttctatgtatcatatgtaaaatgcagcctacacatttaaatattcattctcaacctatttaatattacaaaatacaagcaattcatccactatgcttaggtaaaattatcaactccagaactgtcttattttagtaatgagtaagtctgtaattaaatgagattaacagttcttcactgacatctatttattacctatttatcatattccagacactaaggggggtacgaaaatgaacaagaaaggttcctgacctcaatctaatgtgatagggtgacaaaaatactactgtaatgctataaagacatacatatatgggtgtgtatatatatatttatataatttctatgagaacaaagaggaataaataactcacttaagtagttacaaaagaattagaacaagctctaaataaaacgagctcctgaaggaagcactaaacatggaaaggaacaaccggtaccagccactgcaaaaacatgccaaattgtaaagaccatcgaggctaggaagaaacttcatcaactaacgagcaaaataaccagctaacatcataatgacaggatcaaatttacacataacaacattaaccttaaacgtaaatggcctaaatgctccaattaaaagacacagactggcaaattggataaagagtcaagacccatcagtgtgctgtattcaggaaacccaactcatatgcagagacacacatggactcaaaataaagggatggaggaagatctaccaagcaaatggaaaacaaaaaaaggcaggggttgcaatcctagtctctgataaaacagactttaaaccaacaaagatcaaaagagacaaggccattacataatggtaaagggatcagttcaacaagaagagctaactatcctaaatatatatgcacccaatacaggagcacccagattcataaagcaagtccttagagacctacaaagagacttagacttccacacaataataatgggagactttaacaccccactgtcaacattagacagatcaatgagacagaaggttaacaaggatatccaggaattgaactcagctctgcaccaagtggacctaatagacatctacagaactctccaccccaaatcatcagaatatacactcttctcagcaccacactgcacttattccaaaattgaccacacagttggaagtaaagcactcctcagcaaatgtaaaagaatagaaattataacaaactatctctcagaccacagtgcaatcaacctggaactcgggatcaagaaactcactcaaaaccgctcaactacatggaaactgaacaacctgctcctgtatgactactgggtacataatgaaatgaaggcagaaataaagatgttctttgaaaccaacgagaacaaagacacaacataccagaatctctgggacatatttaaagcagtgtgtagagggaaatttacagcactaaatgcccacaagagaaagcaggaaagatctaaaattgacaccctaacatcacaattaaaagaactagagaagcaagagcaatcacattcaaaagctagcagaaggcaagaaataactaagatcagagaagaactgaaggatatagagacacaaaaaaacccttcaaaaaatcaatgaatccaggagctggttttttgaaaagatcaacaaaattgatagaccgctagcaagactaataaagaagaaaagagagaagaatcaaatagacacaataaaaaatgataaaggggatatcaccaccgatcccacagaaatacaaactaccatcagagaatactataaacacctctacgcaaataaacttgaaaatctagaagaaatggataaattcctcgacacatacaccctcccaagactacaccaggaagaagctgaatctctgaatagatcaataacaggctctgaaattgaggcaataattaatagcttaccaaccaaaaaaagtccaggaccagatggattcacagccaaattctaccagaggtacaaggaggagctggtaccattccttctgaaactattccaatcaatagaaaaagagggaattctccctaactcattttatgaggccagcatcatcctgataccaaagccgggcagagacacaacaaaaaaagagaattttaaccaatatccctgatgaacattgatgcaaaaatcctgaataaaatactggcaaactgaatccagcagcacatcaaaaagcttatccaccatgatcaagtgggcttcatccctgggatgcaagactggttcaacatacgcaaatcaataaacataatccagcatataaacagaaccaacgacaaaaaccacacgattatctcaatagatgcagaaaaggcctttgacaaaattcaacaaccttcatgctaaaaactctcaataaattaggtattgatgggacgtatctcaaaataataagagctatctatgacaaacccacagccaatatcatactgaatgggcaaaaactggaagcattccctttgaaaactggcacaagacagggatgccctctctcaccactcctattcaacatagtgttggaagttctggccagggcaatcaggcagaagaaggaaataaagggtattcaattaggaaaagaggaagtcaaattgtccctgtttgcagatgacatgattgtatgtctagaaaaccccatcgtctcagcccaaaatctccttaagctgataggcaacttcagcaaagtctcaggatacaaaatcaatgtgcaaaaatcagaagcattcttatacaccaataacagacaaacagagagccaaatcatgagtgaactcccattcacaattgcttcaaagagaataaaatacctaggaatccaacttacaagggatgtgaaggacctcttcaaggagaaccacaaaccactgcttaaggaaataaaagaggatacaaacaaatggaagaacattccatgctcatgggtaggaagaatcaatatcgtgaaaatggccatactgcccaaggtaatttatagattttcaatgccatcctgatcaagctatcaatgactttcttcacagaattggaaaaatctactttaaagttcatgtggaaccaaaaaagagcccacattgccaagtcaatcctaagccaaaagaacaaagctggaggcatcatgctacctgacttcaaactatgctacaaggctacagtaaccaaaacagcatggtactggtaccaaaacagagatatagaccaatggaacagaacagagccctcagaaataatgccacatatctacaactatctgatctttgacaaacctgagaaaaacaagcaatggggaaaggattccctatttaataaatggtgctgggaaaactggctagccatatgtagaaagatgaaactggatcccttccttacaccttatacaaaaattagttcaagatggattaaatacttatatgttagacctaaaaccataaaaaccgtcaaagaaaacctaggcaataccattcaggacataggcatgggcaaggaatttatgtctaaaacaccaaaagcaatggcaacaaaagccaaaatagacaaatgggatctaattaaactaaagagcttctgcacagcaaaagaaactaccatcagagtgaacaggcaacctacagaatgggagaaaatttttgcaatctactcatctgacaaagggctaatatccagaatctacaaagaactcaaacaaatttacaagaaaaaaacaaccccatcaacaagtgggcgaaggatatgaacagatacttctcaaaagaagacatttatgcagccaaaagacacatgaaaaaatgctcatcatcactggccatcagagaaatgcaaatcaaaaccacaatgagataccatctcacaccagttagaatgatgatcattaaaaagtcaggaaacaacaggtgctggagaggatgtggagaaataggaacacttttatgctattggttggactgtaaactagttcaaccattgtggaagtcagtgtggcgattcctcagggatctagaactagaaataccatttgacccagccatcccattactgggtgtatacccaaaggactataaatcatgctgctataaagacacatgcacacgtatgttcattgcggcactattcacaaaagcaaagacttggaaccaacccaaatgtccaacaatgagagactagattaagaaaatgtggcatatatacaccatggaatactatgcagccataaaaaatgatgagttcatgtcctttgtagggacatggatgaagctggaaaccatcattctcagcaaactatcgcaagaacaaaaaaccaaacaccgcatgttctcactcataggtgggaattgaacaatgagaacacatggacacaggaagggaaacatcacacacctgggcctgttgtgggttggggggaggggagagggatagcattaggagatatacctaatgtaaatgacgagttaatgggtgcagcacaccaacatggcatatgtatacatatgtaacaaacctgcacgttgtgcacctgtaccctaaaacttaaagtataataataaaaaaaaaacaatgttttctctctcagtaagatgaaattttttacttaagagttagattaggataaaattcaatcactatcaagataaattcctgtttctaaacaagtgacaagtttttgtattcctctgttgcaaagcctcacagtataacaggatgtgggcatacttaaattttaagtaaaaattctaagtagtcaaaaaggcaaacattagaatattcaggaaaatccagcaatatatgctcatgaatacaatataggtttgttgagtctaaccatcccatttcacagacgttctttgacctctgattaacaagaaatggttcttcctctaaactgctacaagagagagaaatgaactttaatcttactaatatgtctcagtgtgctgaggctccttccttccttccccactcccttcctccctccctccttccttttctttctttctcccttcctttctcccttccttcctccctttctttctccctccctcccttccttccttccttgttaagagacagtgtctttctgtgtcgcctaggctggaacgcaatggcatgtgatcatacctcaatgcagctttgaactcctgggctcaaatgatcctctcacctcagcctctcaagtagtaagactataggcacatgccaccatgcctggctaatttttaattttttttttgtagagacagaggctcctatctcttgctcaggctggtcttgaactcctggcctcaagggatcctcctaccttggccttccaaagtgttgggattacaggcataaaccaccctgtctggccatgggctctcttttttatagcagcttggcctattccttaactaataaggcagaaatggcaatgaatgtacactactttctgaaagatatgatacatgaaacttaaaaattagtttccaaaattcacatttaatatgctgtaaggtctcttctttactcaattgcaaagtaaaataccaactcatatagatgcataaaagcagctttgttatgagtgtgtcataactactttaaaatagcaaccccatgaatgttcaccttagattgttttctagaatccccatcactatggtagccatataccccagtttgcccgttctagttaacacttgttgcacagtgaaatgatcactagcattccttttattccattattatcctggaataaaatttttgaatagcaaattataagttcaccctacctatcatctactttctgttgcccttaaaaaaaaaaaccccaataatttgtcttttcattctggaggtcagtttctatcatttaacatctttaatatctttaggaaaaaaaggtatccagttttaactactcagtctctgagagtaattggctaaaaatattcttcaattttactattaatgtacctcttcccccctccctcacccccatatttgctgtgaaagaacacccttgccttctttagctcagaaattttttaaaaaggacatcgtagaggcatctaggagaggtaggaaaaatggaccaattctgtattaattttccatggtgaatactttttgagactatctcaaggtaaaaacatagaattcaatttaagtctataaaataataaactgtccaggcacagtggctcacacctgtaatatgaacactttgggaagccgaggcgggaagatcacttgaggtcaggaattcaagaccagcttggccaacatggtgaaaccccgtctctactaaaaatacaaaaattagctgggcatggtgccgggcgcctgtagtcccagctacccagaaggctgaagcaggagaattgcctgagcacgagaagtagaggctgcagtgagccgagatggtgccactgcattccagcctgggcaaagagcaagactctgtctcaacttaaaaatatatatatacacacacatatatgtgtatatatatttatatattaaaaatatatttatatatttaaaatataatttcaaaatatatttaaaatatatatatataaattaaaaataatgaatactttttaaccaacacaacagaatatatatttttaaaagtgttcccttcaaatagtcattttgagaagttctatgatataccacaacttgaagcattttcagaatatctgcttggaaactgtgtttaagccagttcaagatttaccaaaaaaaaaaaaaatcatttcactaacttatagacaagcctatttttactgcctttcctttactaaaattattaattttgtgaataattctccatggccaagagccccttctctgttctgcatctccctgataaatcccttagtcttttgatgtgccatctgccccagtgctatgtatcaaccattcctctacagctctgaaagcaggaactgattatttcgctctttttcccctaggggctgaagtacaagacactcaattaagatgtttgggattaattaattaatattcaccaaatatggatacaagttatttttggctatttccaaaaatcaaatttaccttcaaaggaagatttgctacccttggaaatatttaaaagaattgaaggcgatgccagaaaaaggagctccaaagatgctaaacaaatgttgcatcatttgcataaatacattatccaacatacaccctcctgagactgaaccaggaagaaaatgaatccctgaatagaccaataatgagttctgaaattaaggcagtaataaatagcctaccaaccaaaaaaaaagcccaggaccagatggattcacagctgaatttaccagaggtacaaagaagagctaataccattcctactgaaactattccaaaaaattgaaaaggaaagactcctccttaattcattctatgaggccagcaccattctgatacctaaacctggcagacatacaacaaaaaaagaaaaattcgggccaatatccttggtgaacatcgatggagaaatccttaataaaatactggcaaactgaatccagcagcacatcaaaaagcttatccaccacgatcaagctggcctcatccctgggatgcaaggttggttcaacatatgtgaatcaataaatgcgactcatcacataaacagaactaaagacaaaaaccacatgattttctcaatggatgaagaaaaggcctttgataaaattcaaaatcccttcaggttaaaaactctcaataaactaggtattgaaggaacatacctcaaaataataagagccatatatgacaaatccacagccaatatcatactgaatgggtaaaagctggaagcattccccttgaaaaccggcacaagacaagaatgccttctctcaccactcctatcaacacagtattggaagttctggccaaggcaatcaggcaagagaaagaaataacaggtattcaaataggaagacaggaagtcaaattacttttgtttacagatgacatgatcatatgtctagaaaaccccattgtctcagccccaaagcatcttaagctgataagcaacttcagcaatgtctcaggatacaaaattaatgtgcaaaaattgctagcatttctatacaccaacaacaggcaagcagggacaaatcatgaatgaactcccattcacaattgctaaaaaagaataaaatacctagaaatacagctaacaagggaagtgaaggacctcttcaaggagaactacaaaccactgctcaaagaaatcagagaggacagaaacaaatggaaaagcattccatgctgataggaagaatcaatatcgttaaaatggccatattacttaaagtaattaatagattcaatgctacacccactaaactatcattgacattcttcacagaattagaaaatctattttaaaatttatatggaaccaaaaaagagcctgaatagccaagacaatcccaagcaaaaagaacaaagctgaggcattacactacccaacttcaaactatactacaaggctacagtaaccaaaacagcacaacacttgtacaagaacagacacatagatcaatggaacagaatagagaactcagatataagaccacacacccatgactgatggtggcaactgctccagtcagcctgccatcacttgcccagcagggaggtgtggctggggctgcatgctccaagacgcaagcaggagccctgctctcctgggtgaggctgcagccacccaagttgtagctgcaggtctgagcctccttgtgcttttggggagctgggagcaggcaggagccaccactcctcaacccagatgtgcctgcccctgctgcctggcttctccctgctgtccacaactgctcagatcttggagcaaagtcaggcgagcctgagtgtcattgaacagcagtgggaggcagacagagtgccaggtggaagggggcgggtccctggtaaggtccctccctcaggccagggagggcctgtgggctgggggctgggctgccagtcccatggaccagagtggaaactggtgcctttctcaggactgcccatgggccaatctgcatgcacttcctcacctctgaggcccataaaaccctgggctcagccagagctgagcagacaactgaactggatgactaactgcagaaaggagctaccctctctgctgagagtttcagagacctgcagagatcaccaaatgacctgcctgcagagaagaactaccctctccagggcctcctctctgatgagagctgaacactcgatggatgacctgcctgcctacagaggggagctacccactgcgggtctcctctgagcagttgtaaacctaaataaagctcttcttcgtcttcttcacccttcatttgtctgcatacctcattctacctcattcttcctggatggacaagaactcaggcaaaggcataactggccacagaggtttccaaaaattgacacccaaagatcccgtaacacaaccatctgaacttaacctgacaaaaacaagcaatgaggaaaggacttcctagttaataaatggtgctggaagaactggctagccatatgcaggaaattgaaattggaccccttccttacaccacatgcaaaaattaactcaagatggattaaagacttaaatgtaaaacccaaaactataaaaaccctagaagaaaatctaggcaataccattcaggatataggcatggacaaagatttcatgacaaaaacgccaaaagcaagtgcaacacaagcaaaaactgacaaatgggatctaactaaattaaagtgcttctgcactccaaaataaactataatcagagcaaacagacaacctataaaatgggagaacatttttgcaatctatccatctgataaaggttaatatccagagtctacaagaaacttaaacaaatttaaaagaaaacaaacaaacaaccccatttaaaaagtgggcaaaggacataaacagacaattctcaaaagatgacatacatgcggccaataaacatatgaaaaaaagctcaacatcactgatcattaaagaaacgcaaatcaaaaccacaatgagaaactatctcatgccagtcagaatagctattgttaaaaagtcaaaaaacagatgctggtgaagttgtggagaaaaaggaacatttttacactgctggtgggagtgtaaattagttcaaccattgtggaagacagtgtggcaattcctcaaagacttagaggcagaaataaaatttaacccagcaatcccattactggtatatacccagaggaatataagtcattctgttataaagatacatgcacacgtatgttgactgcagcactatccacagtagcaaagacatggaatccatctaaatgcccatcattgatagactggataaagaaaatgtggtacatacataccatggaatactatgcagtcataaaaaggaatgagatcatatcttttgcagggaaatggatggagttggaagccattatcttcagcaaagtcacacaggaacagaaaacaaaatactgcacgttctctcttataagtgggagagaacatgtgggacacatggtggggaagtacacacactggggcctgttgggggtggagtggggggagggagaacatcaggaagaatagctaacgtatgctgggcttaatacctaggtaatgggatgatctgtgtggcaaaccatcatggtacatgtttacttatgtaacaaacctgcacattcctgcacatgtatccctgaacttaaaagctgaaggaaaaaaagaaaaaaaatacattgtctattttccttaggcactagagagcagtctttcgaatatacaagctctgttatgtttgttaaaagaatgagtcttattgccccatggcctagagctccttaactaactgaaatcttccaaataaagaaagaaaaaactcagtccagagccaaactggctattcttcatcaatatctggccttaaaagtgttcttacttttaaagactctaattcttctctcccagataaaactgccaatcagtcagtgtcaaaatgcatcaaccctgacaaaaccttttttttttttttttttgagacaggatctcactctgtcacccaggatctgggtttcagtggtgtgatcatggctcactgcagccttgacctcctgggctcaagcaattctcccacctcagcctcatgagtagctgggactacgggcatgtgccacaaccctggctgttttattttttgtagaaatgaggtctcactatgttgcccaggctcgtcttgaactcctggcctcaagtgatcttcccacctcggcctcccaaagtgctgggattttggcgtgagccactgtgcccaaccctgacaaaaccttaattactttataatcctttccctaaatttttcactaaacatttccccaaggccaggtaatccatctgtaatgatagcactttgggaggctgaggtggaaggattgcttgagtccaagagttcaagaccagcctgggcaacataatgataacccatctctccaaaaaaataaaaaataaattagtcaggtatggtggtacacacctgtcttagtcctgctactcaggaggctgacgtaggaggatcacttgggcccaggagatcaaggctgcggtatacagtgagccatgattgtgccattgcactctagcctgtgcaacagaggaagaccctgtctcttaaagaaaagtttctctggctgggcgcagtggctcatgcctgtaatcccagaacactgggaggccaaggtgggcagatcacttgaggtcaggagttccagaccagcctggccaacatggtgaaccccgtctctactaaaaatacaaaaattagctgggcatggtgatgtgcacctgtaatcccagttactcgggaggctgaagcaggagaactgcttgaacctgggaggcggaggttgcagtgagctgaaatcacgccactgcactccagtttgggcaacagagcaagactccatctgaaaaaaaaaaaaaaaaaaaaaaaaaaaaaaattggccgggagtggtggctcacgcctgtaatcccagcaatttgagaggccaaggcgggtgggtcatgaggtcaggagatcgagaccatcctggctaacacggtgaaaccccatctctactaaaaataaaaaaattacccaggcgtggtggcgggtgcctgtagtcccagctacttgggaggctgaggcaggagaatggtgtgaagccgggaggtggagcttgcagtgagccgagatcgtgccactgcactccagcctgggtgacagagcaagactccgtctcaaaggaaaaaaaaaaatttctccaaaccttagctttaaaggatttattattaaaaactatactctatcctactgtaaaaatagcttgggtttaagttttaacatgacttctcttataggaaattagaaaaatctctaaagatatataactaggagaataaatttctatgtatctttccaattaactagacctgtccccctttttactaacaaacaatatttccgggtatcatggcaatgcttgtatagctataaaaatgccaaaatcaagtttccacgagacctagttctataaccacggtaagattaaaaaaaaaataaggctcagtagctgaacttaattaactttaaatgaataaatcatccaatcacagatgaatgagtctcaaggggcagtaaaagaaaaattatcacaggtaagggagactgctcaatatttaaagacttgaaaaagcataagctaattataactcagacgttataaatgccataccttaaatttccatgatcacatagtagtgaaatttagctgttttcttactattaagactatcatggaaccaggttgtacacacagattcttaggaattcccaaatataagagttaaattatatgaaaaagttaccagtatttgttatttccagtgcttacactgagcaaaaaaaccaccccattaccaacctaccacatcactgtatgagtcaccttaaaacaagattttcctcctttgttagaaacaagacagtcttatacctagcaacaagtgataaggtacaagtacgactttattttcagtaaagtcagcacctgacagcacttgaacaaaagcatattactattcttagagttttattctatcattgttgttgttattgttgttgtttttagaaacggggtctcactctgtcacctagggtggagtgcactggcatgatcacagctaactgcagcctcaacctcttggactcaagtagtcctcctgcttcagcctcccaagtagctgggactacaggtgtgtgccaccacaattggttaatttttttattttttgtagagacgaagtcttgctatgttgcccaggctggtttcaaattcctggcctgaagcaatcctcctctcaccttggcctcctaaagtgctgggattacaggcttgagccaccatgcccagctcactgttattcttacttttaaatgttggatcctcaagaaaaatgttcagagggtacacccctgcccattgtaacctataaaaaaaaatttcctttaagaaaaggaaggccctatttgtcttcctgtatggcaatgctgcagatacctaggcaatatttatgccttactctacatatgattcattaatttgagcaccacaatctgacccaagcaactgaattcccaaaataacaaatacacatttattcagagagtaagtgtacaaagattatatcattatatacataatactttttgtcaatagtataagatcttcttagacatatgtgtcaacactgtaaaacagatcatttgtaactgtttatggttgcataagctttggatgaaaatggttaacatccttgatgaatgactcccagatgaattttatcattaaggtttcctgacatcttgcattctacttaataccactttgtcttttgaaatctttacatcatcaacttaaaacaaagcattattttttgcttttgaaatcaaaatattcatttgtgtgaatgatatacttcacaattcaaactgaaaaaaaataaaatttgcttattatttgtatgggattgtgttaattttggcccataaacttggaagcagttatgttagcattttcccttgaaatataattgataattctatatccttatctctgaaatggtgacattattcccttggccatattcatgtcttaaaaatcttggctgatgtggcagaaaaaaaatcatcattgatccatgctgttgaagccctggacaacctccatttcttcatcctcaaatatcacatgctacacctatggtaacagtaacagttaccatttattgaaggcttaaaagggctaggtgctatgctaagctgaatatgcgctgggtagaaaataaacatgaataaaaatgtaagttatattttagtgcacatgatcttacctgccattccactcaacaagtgtaggtaacaaagtaagcatgagatggaagaaactgtgcccctcagacagtctcagttacagagttgtatgcccaaaaccatttactttgttctttgtgagggatttaagagattttttaaggataatttttactgtatttgatttttgccctatatgctcactttagaatcctaaggtgggacttcactgtatcacacttggccctcataaatgactacgtgaggtagtatacaactataagccccattctacagagacggaaacaccaagagaggttatgcaacttgcttggcagagacaggattccaacttaggttgttctgattccaaaacctctgcacttaattactatgctatattgcaatgttatatatcaattttccagataagaaatgggaggctcagaaagatcaagcaaacttacccccaaaaaacactgctaacaagtctctataccaggacttaaactcaagctttctaatttcaacttccttggccatataataaaatgactgatagaagctaagaatcagtagtagagtaatgaaatggaaggaaaatatattgtttatagtgtctacacattggtgactcactagttaaatctgggcctcagatatgttctgtttagccttcaagatatagttctttaaatctgtattagttgttatacaaagtgtgacaatagctattccaaacattcttatcccttgctgtcactcaatgattaaaatggaaagccatatacttactttcccaggctctattgcaactagagtaggccatgtaacctagttctggtaggagacttaaagagaaagctactgggaatgagcagttggtttctgggaaaatttttgcttcctaatgaatggtacagccactgctggcactgtaccttttacccctttctgcaacaaatatggatgtactgccagagctacaatagccatcttttatgtggaaaaaagcagaaagatgggaatcaaatacactattaatggcaaaacaggaagatataaacaacttagatctttatggtattgctgagctaagttagtcctagactatatgtatcttcaaatttattgttagataaaccatattcctactgtttaaatttggtcttctgttacttacaatcaaaataatttccagccaattcagttgccaacatttaaaaatcagaggatttcagacaggcagagtggctcacacctgtaatttcagcacttcgagagcctgaggtgggagaatggcttgaagccaggagtttgagaccaccctggacaatatagtgagacctcatctctacaaaaactaagaaaaaatagctgggtatgatggtatgcaactatagtcctaactactactcaggaggctaaggtgggcagattgcttgagcccaggagttgaaggctgtagtgagctacgatcttgccactacaccccagcctgggagacagagtgagatcctgtctctaaagtccacccctcccaccaaaaaatatcaaaagatttcatataatctgctaattactaatgtttctcgagatataagacttttctggcaatactgggtctacacagagtcacactggcagcctctgaagacagagctcatagtctcctacttaccacagatcctatttggccagcttcactaatgtatgtcatctgccaaatcttatagccacacttaaatgtacaacttcctatatctcaatctaagtctggtctagaacccaagtggccacctgaacacctagcattaaaaaaaaatctccagccaggcacagtggctcaggcctgtaatcccagcactttgggaggctgaggcagacggatcacctaaggtcgggagtttgagaccagcctggccaacatgatgaaaatccatctctactaaaaatacaaaaattagccgggtgtggtggcacacatctgtaatcccagccacttgggaggctgaggcacgacaatcgcttgaacctgggaggtggaggttgcagtgagccaagatcacggcactgcactccagcctgggcgacagagcgagacgccatctcaaaaaaaaaaaaaaaaaaaaaaaaaaaaaaatatatatatatatatatatatatatatatatatatccaatttctactaaagatgtagtaaagggcttttacactagcaaaagctctcctgaaactgcccaagaggtaagctgttctgacctttattcttggagccaaactctggcaattatttaacagtaaaatgggcaattaaagtagtcaattttccagttatgaaattctgtgaacccctaggaagcaatatttatgaataaatcccaagattccaataataaagagtccaagaagcttcctatatttctttcttttttcttttttttttgagacggagtttcattcctattgcccaggctggagtacaatggcgcaatctcggctcaccgcaacctctgcctcctgggttcaagtgattctcctgcctcagcctcctgagtagctgggattacaggcaagcaccaccacgccggcctaattttgtatttttagtagagacgggatttctccacgttggtcaggctggtcttgaactcccgacctcaggtgatccgcccgcctcagcctcccaaagtgctggaattacaggcatgagccaccgctcccggccagcttcctatatttcttacatagaagtggcaaggcaatataaaaccacagcatctaaaatcccccaagcaagaaaataaggttgtcatttggtagtctcagtagcaaagtaagcttgtaccaccactgcacagtcctagtgaagggtttaggattcctgtatccaaagctatcttacaagtgtatatcttatatcttatatacaaagcagaccttacaagtcacagttgaggtgatgttctgagacatttcaaggagactgtcatttaggataaactgcttgactttcactacaagcagtttcaagaaatgacacacctatctcgactgccaaaagactatttctggccaggtgtggtggctcacacctgtaatcccaacactttgggagtacaaggcaggagaattgcttaagccaggagtttgagaccaacctgggcaacacagcgagaccatgtctctaaaaaaataataataaaaaaagtaggcaggtgtggtggtacgcacctgtagtcccagctatttggcaggctgaggtggtaggatggcttgagcccagggggttgaggtgagctatgatcataccactgcactccagcctgggtgacagagagagaccctgtctgaaaaaaaaaaaaaaaacaaacaaaaaaccccaaagagtatttcttgtcagttcttcaaacaaacattaataatttaaatgaagagccaattattttaaaatcattcaactgtgcccaatgagcattaaatgaggatgcaaatgtccaatgtaaaagttcattgcatctctatctaaaaagaattttaatagctttaatggtagctgtagataacaacaaacaacagttctatcttcaaatatacttcattacacatgacttcattaccattaccaagatggtcatgccactttcaatctaaggtgtactgtatacaacttctcataaaataacacgagagaaatatatatttgacaaatatatatttgcaaccataaacagttacaaatgatctgttttacctaaccaaacttcctttacagtcaatacagtttcctttaaaatttaatagaaaaccatggaatcagcataaaaatgctcagagttgtgaaagtttcagtttgtatagacaggtcaagaagacaaattagcatattatgttcacagaaaactcagtgtcatttttttcagtactcaaagaagaaataggttgtttctattttttgataggattcaataaaaactgtaatcttaaagcaaccaaagcttgaaccaaagatctcttgttatattatatgtgagttcattcacatgttctcctattgttgcttcagacacttatagaaaaagcacattcagttgctttggaaatgcatctaagagcagcattcaatttcaactgccaactgctcgtaatagctggattagacagatcattcttctcacctattgtttccctttacaaagatatatttaaacccatgaatacactcagtgtctttggatctccatattttaaaaaaaatctggcaatttctattttgccacatgatttatagtctcaatcactaaaaataccaacacattcattctatgatttgactatacaaactaaagtgaccacttgcaacgatctgtcccactatattgaaaaacagtcaatggattaatatgctgctaagcatagcctattaaattgataaactttcaagggaagaagaattttaaagattacagttggattaatcattctgtatggtgctccagggtcatcacaaaatcaaacacaaaagactttgctgtggaaattggcaactaaaacaaagattctctaattaaaaaaaaatgaagccattatgaaataacaaaaatttatttttttaaattttttatatatatatttttattatactttaagttctagggtacatgtgcacaatgtgcaggtttgttacatatgtatacatgtgccatgttggtgtgctgcacccattaactcgtcatttacattaggtatatctcctaatgctatccctcccccctccccccaccccacaacatgccccagtgtgtgatgttcccctttctgtgtccaagtgttctcatgaaataacaaaaatttaaaaagcgataaagagaaattaaactctgaaataggctttccatgtgaattacattgtcataaaaaaaataacttccccaccaaatttgttataatgaaaaaattgcttaataaccaaatagcaaccctaaatcaccatcattataaaaatgactaatactttgtgaatacatgtttatttggtgccaggcatggtgctaatgcactccctggcttaacactaacaatatttttgtgaaagaagtaccatattgcccctattttacaggtgggcaaaccaaagcatagagcagttaagtgacttgtctaagtctagcaaattataaactcaggattcaaatttaagcagacagttttccagaccctgtactgccactgcatcatgttgttaaagattttttttttctttctttttttttttttttgagacagagtcttgctctgtcacccaggctggagtgcagtggcgtgactcactgcaaccttggcctcccaggctcaagtgatactcgtgcctcagcctccagagtagctgggataacaggcgtgcaccaccatgcccagctaatgttataggtatttttgaagtcctaaggagagaaataaaaatacttttagggcttctccaccctcataaggtttatgttaggataactggcaggtaacatttttattctaaatcacaatcactttatcaaactccaaagaatcaatgagcttccttaatagattaagataatgtactacaagatgctaacacgtggtttatcctaatacttgcctgagatgtgctaaatattgtaattatgaagaaaaggctatctcaaattcctactgtttctatttgtgtctgatggaacaataggagaatcactgctccaatcagcaagctgcatggaggtgtcttctttaacttcaataaatataatttcttacatttcctgatctgtctgtagcagtaaaaaaaaaaaaaaagggtttgtcaggtttttccctttttctttaagtgaggaaaagtacagaggtgggagagcaaagaataggtgaggggcaaatacccacaaacacacactttccaaacatagaagtttcaaatctggctgccatgtcttagataacagtatcttataataatcattcagtagaaaaaaaaactggcttctaattataaatgaaactgaaaggaattaatatctagaaggaaaaaatttatctcattttgctaactgcaaagatattttgctcttccatcttttccaatttagttttttccaaattccctgaccattatcccctttggaactgatgttttcttcacatgtacacatttggtttgtgcctttcccactgctcaccatacgaggcaattaaacatgcttagtttatagctgccttccccaccagtcttgtaaatttgaaggcaaaggtaatgccttatatcatccctcagtgtttgagaaggctctcaacaaacttctgctgaactgccttcatatcaagtactaaggcaggagcagcaaaatgacacaaattgcaatgattcaaactatggcagggcaaatctaaaactaaatgattaaaaaatagaataaatcccatcctggctaacatggtgaaaccccatctctactgaaaaatacaaaaaattagcaaggcatggtggcggatgcctgtaataccagctactcgggaggctgaggcagaagaatcacttgaactcaggaagcggaggttgcagtgagccgagattgcgccactgcactccagcctgggcgacagagcaagattccatctcaaaaataaataaataaataaattttaaaaatagactaaatcaggccaggtgcatatggctcatgcctgtaatcccggcactttgggaggctgaggtgggaggactgcttgagcccatgagtttgagaccagcctaggcaacaaagtgagatccccatctctacaaaaaataaaaaaaattagctgggcatggtggcgtgagcatctgtgatcccaggtacataggaggctgaggcagaagaatcccacttgagcccaggaggttgaggctggagtgagctgtgtttgtaccactgcattccaggctgggtgacagatggagatcctgtctcaaataatcaatcaatcaatcaaacagtactttgattgacactgagaaggtaacacctaagggcaggggggtggaatttagtagttgctttctgactctgacaaagttcaaatcccagctctgccatttctagctgggggagtctagacacctccctgagactcagtttcttcatctgtaaattgagaacaataatagtactacttccaatggttattgtgatgcctatttagtgctgaacccagtgtctacaatcacaaatttgcacagtcactttaaagaaaagccaactgtattcaaggtaaaaataagggtgcagatgttaaaattcagaagaaattatctttacttctccagccttattttctgcactttacatggcatcagcactgtactgcctgtggttcccagcatatatcatgctatttgtagccctgtgccttaagttcttgcttaataatgtttcttttgactgggcactgtggctcacgcctgtaatcccaacactttgggaggctgaggtgggcagatcacttgaggtcaggagttcaagaccagcttggccaacatggcgaaaccctatctctactaaaaatacaaaaattagccaggtgtggtggcctgtgcctgtagtcccagctactcgggaggctgaggcagaagaatcacttgaacccgggaggcggaggttgcagtgagccaagatcgtgccactgcactccagcctgagcgacagaacgagaccgtctcaaataaaaaaaaaaaaagaatgctgctttccctcctgccactcacccctaaccctctgtttgctgaccaattcccactcactcttcaaggctcaagttataagtccttgctggccttcttcctctttctcaaggcttatgtatttgtgacaactacactgtaatctactgacctatttaatatcaatctttctacttctactgtaagcttcctgaggttagagactaactggctgctggattcccagcagtggtataaatgagtaagtaaataaatatgtctcagacacaaaaaaggtactaaataagtttttcagaaaattaaatcaaacagttccataaaaactaagctggaacagagtattatctctccccatctgtttctaagcacatcctttcccactcaataaatgaagtacttccctctatctttcaggaagtctagggaaccatgggacctttcattacatttcagagccacgagtacctcaccagactttaccttgagaggaaaatgaggggcactgtgatcagtagctttgctgctcagatgggcaagaaaatgcagggtagtttataaaggtatctgaagagaactcagtgctgagaaacaaaggaagggaatgtatgagatcacctgcacaaaatagcactcactaaatacttctgattaacaagattcttaaggttttactcatgtacatccagcctctggcatatttcaggttgggcaaaggggctcatcaagaattacactttttttttttttaattggaaatactttccctactactaggtttactgaatggaaaaactacagctaggtgttttttttttttaatggattaacaaataaacataaaacatggacatgtgaatagcttcaaaaggctaggcactgctgcagacaacactacagcaggcatttaatggaaaaacagtaaatcttaagctgctgaaaccaggagtgatttatttatttatttattttctgagacggagtttccctcttgttgcccaggctggagtgcaatggcgtgatctcagctcaccacaacctccgcctcccaggttcaaaccattctgcctcagcctcccgagtagctgggattacaggcatgcgccaccacactcagctaattttgtattgttagtagagacagggtttctccatgttggtcaggctggtctcgaactgccgaccttatctgcccacctcagcctcccaaagtgctgggattacaggcatgagccaccgcgcccagctatcaggagtgatatttaatggtgaaacctaggaaggcagtgctgcacagtgtctttttcagcgtgagcataatctagaaactgctccctctcacttaaagccggataggaaagatgagaaacctgaagatactttttgaggaccaaaggccttctctttttctgggcttcccaggtacttgagtgaaaattcaaaatgtaagctagtttaaagtttattttctatgcatgcaatttaataaatactaagtaatatatgctaaactaactaaattcctatgagacttgcaatggaacttctatggaacaccttatacctgaattaagtatttgggaatttagtacttcccaaggaggagttccacaccattggaaaaaaggagtgactgtttcatataatgaactaagaaaagctgctatttggaataaaataaacataatccttacttcacatcatgtagtaaaattaatttcagacaattaaaagatataaaaataatactataaatagctttaaaacatataggtctaaattttttcaataagtagaatatttctatccttattgacggaaaagtgaactaagaaaaataattttaaaaacccacacacaagactggattgatggcattaaaattttgtaaatgtctgtatatacaaatgaatgaaataaacaaaacaaaatggcaaatgaaaaaccagaggaaaatttgcaacataacagaaaaaggttaatattcttagtatataaagaatacttacacatcaatatgaaaaagtaaatagccatgaagaaagctgggcaaagaacatgaacgatttacaaaacaaggaatatataataaaacatataatagtaaatatttgaaaaaatgtttagcctctaatttttaaaaatgtaaattaaaacaacaataaaatactagtgattaagagaaggggttgtgaggtcagacaccaggcctataatcctggacaattcacttcacttatctgagtctgtattttcttggtaaaatcaagagaataacaatgcttacgccacaggagtgatgtgaaaattaagcaacatgaggcacaaaaggtactcaacacagtgtctagtatacagtaagtgttcaataaatatccctatgatgatgatgctacttaaggctgtgagactacacttaaacatttttatacaatgcttgtaaacaaagattgattcaacctttctgctggataatttggcaacatgtatcaaaagtcttaaaagtgatcatatcctttgggcttctcaagatatctgtctatgcttaaaaacagtagaagaactcaaaatagaagattgctaaatatgactatatctgttgatcatccattgatccatgtgtcaaatactttttttttttaagagggagtttcattcttattgcccaggctggagtgctatggcgaggtcttggctcactgcaacctctgcctcccgggttcaagcgattctcctgcctcagtaggagtagctgggattacaggcatccaccaccgcatctggctaatttttgtatatttagtaggctggtctcaaactcccgacctcaggtgatctgcctgcctcaacctcccaaagtgctgggattacagtagtgagccaccgcgcccagccccatgcgtcaaatacttttgagctctgataatacaaaaatatgtaaatgacccagtccctgacttataggttagtgggggagataagtaataaaacaagtacagtagaaagataagagccaccatgggtaagtatagggtgctatgctgtgcgtagaaggagcacctaccatgatctgagggggtggagtcagggaagcttcccagaagaagtgacatttaagctgagacctgaaggatgagtaggaaatagttaggtagagagatgagggaaaagtgttccaggtaaaggaaacagcatgtgcaaaagcctaaagaccaaagggagcatgggcatgtcagcttaactgtgagcagtgtgcaaggcagggacttgggaagagacagggctgaagaggtaagcaaggctggatcatttaaggtctcactagcaattcaaattatagactttattctaagaataatacaaactgaattaaaaagcaaatagtttgtaacaaatataatagttaatatttgtaatacatcgagggtacacaaactgaaaagaatagctcataaaaaggaaatacgattgaagtgagtgttgcacaactctgtaaattaattaaaaataattggattgtatacttattaaaacaggtacatttcagagtttgtagattatacctcaaaaaatatatcttttcaaaaactttaatgtaaatgcctaataagcatttgaaaaatacgtgacctaacaataaaatacaaatcaaaccaactaggtactaccctttatcctaaaaaattagtagtgattaaaataaaaatgaaatgaggctggacacattggtgtgtgcttataatcccagctaatcagaaggctgaagtgggaggattgcttgagccaaggagttcaaggctagcctgggaaataacaagacaccaattcaaaaatgaaaatgaaatgagaatatccagtgtaaatacagttaggaaaaatgagcattcttatactatgctagctggaataaacattaattggagtaacttttctagaaaatatatataacagaagtctttaaaaaaattgggtttttttgacggagtcatgctctgttacccaggctggagtgcagtggcacaatcttggctcactgcaacctctgcctcctgggttcaagcaattctcctgcctcagcctcccaagtagctggaacgacaggcatgtaccgccacacccagctaattttttgtatttttagtagcgacagggtttcaccatgttggccaggctggtctcaaactcctgaccttgtgatccgcccaccttggcctcccaaagtgctgggattacaggtgtgagccaccgtggctggccttaaaattgtttataccctataatctagtaattgaatttcttgaaatcttaataaatgttccaaactgagtcaaatatttatagccaatgatgttcattgtaatgtaatttataatagaaaaaaaagggctgggtgtggtgactcacatctgtaatcccagcattttgggaggctgtcgtgagaggattgcttgagcccaggagttcaagaccagtctgggcaacaggatgagaccccatttctccaaaatataaaatatttagctgggcatggtggtgcatatctatggtcccagctttttggtggggctgagatggaaggatcacttgagcccaggaggtcaaggcttcagtgagctgtgattgcaccactacactccagcctgggcaacagagtgagatcctgcctcaaaaaaaaaaaaaatccgggggcaggggggttggaaaaaaactgaatgccaaccgataatggaatggaaaggttagaatgagttaaaactactgaatggagccgggtgcggtggctcacacctgtaagcctgtaacttcagccaggcgtggtggtgcacgtctgtagtcccagctacttgggaggctgagaaggcagaatcgcttgaacccaggaggcggaggttgcagtgagctgagatcatgccactacactccagtctgggcaacagactgagactctgtctcaaaaaaccaaaccaaaacaaacaaacaaagactactgaatgcagtgatttaaatgatatggcaatacatctgtgatagacaccaaacttctaaaaaaacaaagatatgaaattatatatacagcagcacttcagctttataaaataaatggcacatgtctttttttatcttttctgtacttctctgtatttctggatttcctacaatagtcatttctagagtttatgaaaatttctaaagctgtcttcaaaaaattcaaaggcatcactttttttttctctgtcactggtgcctaaataaggaaaagcatcacttgtgtttatacttaatagaaatcaattttgtatttgccttggctttattttctcaagctaggcagagaagtgtgctatatttaatccatatgtacatataactcaataatattcattcagcatcaagaaataaaatgtatatgtaaattgatttacccattaattagaacgtgcatcttaaatgtcaaaactttggtgaaacttagatggacatctatctaaaaatataccacactcaatcctgatcgcttaaatcaagatttaaaacaagagtaagccttcttatgatgattcagaatcatcattaggaacgtataatagtagctctcaggaactactgggtcctagagggctatctgtccctatattaattaggcaagaattgctcaatttttttattatgccaggtacttgtgggttttttttttccttttcccttgtggtgaaaccaacagctatcctttcccagcactatagggaacctgcctttagcagcacctgtaattttccattattatgttgcttttggtaatctaagaataaggaaacttaatatccacatttataagatttatgtataaagtaagagttaataggcttcaaacaaagctgtcacctaaaatggtttgcacaaacttagatgattctgttctaggtagtcaaggttgcaatataaatgatctccaaagagagtgtgagttcttgattgtgcctcatatcttgcacctttactcaactggcagtcaagtctctggaacagaaaccgcatatgctgtttctcttatcacatcatggaaagagatataaaccaggagccaaggaacttacttctatgcagttattacacccacaagttttgtcactttcagccaagtctttaaactgtggtacctgtcctgcataatttttggggctacttgagaattaaattagatcacaaacacacacaccccaaaaaccactctgaaaagtatagggcactacagaaaactaaaatattattatagtattatactttgtttatttaaccctggatcaatataggtatcaattcagaaaattcacaccagattggggattggtgggagaatggggaggagatgatggtcaaagggtacaaagtttccattagacaggaggagtaagttatgaagagctattgtacaatatggtttctacagtcaataataatatattgtagacttgaaaattgtagccggtcacagtggctcatgactataatcccaattctttaggaggctgagacaggaggatcccttgacgccacgagttcaagaccagcctgggcagcaagaccccaagcaagtccccatctctacaaagaaaaaaaattaaaattagctgggcagtcccagatactcagggggctgaggcaggaggatcacttgagcccacgaacttgaggctgcagtgagctatgactgtgccactgcactccagcctgtgctacagtgagaccccatctaaaaaaaaaaaaataaaggaaagaaagaaaattgctgtgagtacattttaaatgttttcaccacaaaaaaagctaactaggtgaagtgatagatgttaattagcctgacttaattattccataatgtacacatatatcaaagcatcatgttgtatattataaatgttttgtccattaaaagttaatacattttttaaaataaaaaagtttaaaaaaagaaaatttataccagaaagaatcaaaagagacagagataattcttatattgccctctaataatcaggaaacatctattatctaggaagaacaatatctatcctaagagttggcatctctgatccctccctgcaaatctaatcagttcccaagtattttccacaacccctcacatctgtctctttctttcctttaccacttcaaaatcccagtttgggcatttattacctcacacctgggcttctagaacagcctctcactggctccactcatggcctctctctctttctcaaagccctctggctcatatctactagatcaattttcttaaaataggccaggtgtggtggctcatgcctgtaatcccagcactttgggaggccaaggtgggcagacggcttgagcccaggagtttgagaccagccagggcaacatggcgaaaccccatctctacaaaaaaaaaaaaaatacaaaatacaaaaattagccaggtgtgatggtgcgtgcccgtagtcccagctactggggaagctgaggtgcgaggatcacttgagcccaagaggtggaggttgcagtgagccgagattgtgctgctgcactccagcctgaatggctgagtgagaccttgtctcaaaaaaaaaaaaaaaaaatcttaaaataccactgtgatcatttctactcaaaacctcagcagactctccactaccttctccatcaagttcaaactccaaactcccaagctcagtagtccctgtgcagccctagctgcctcctcgcctttatctcttactactgtcccatacaaatccttcctcaaactggtctatttaattccttcagatatgccctgtacttttctgcctctaagttttggtgtacacaatttctcttcacttgcaatactctcttcttcacagcttgtctcttggcctatagaaattcaatccatccttcaagaactagttcgagagccacctattaggcatactttttgatcaccaaggaggaaaagatggcagattctaaagttagacacatctgggtttgaattataactccagtcacttactggctgaatgacactgcgcatattccttaataactctgcctcagcttcatctttaagatggggataagagcaacttccctaaggcatactgtgtaaagtaaatgaattaattcatgtaaagcgcttaacatgatgcctggcatagatgaggacccaagaaatgttagatattgttatactcttattattaacattgccattagtgaacttatcttaatctgaattcagacaatacttatgaccatcacaaactcttcaggtacctacagtatcattccccttcttcttcttttccctcttaccttatgtttgttcttcctccaatgccccagccccccagattgcaagatcctgatgaacaggtcaatttcctatacatcttagtatctacaatggtcactcacacctagcatattgtttaatgcctaatgaaacaacactaaagagctggcagtattaaaatgccctgcatcctatagtgtaaaagtattaacagcgtacttaaagtgattaataaaaaaatgtaaatttccagtctcacaaaattaaatctcttctttcatggtcctctaggttctttttgctctctattttaaaacaaacaacccaacctattcatacagcaagagatagaacagcaaaatatatggaggtcagacagcagccaaatgctagagtacaaggacctcgaaacaactcagctgaacacaattctggatgaagtccaataggaagacaatttaaagagaaaggaagctggcttatcagttatactaatgatgctgattgttacaccagccttaggattcctttgcattcagggccaagtataaacaactgaaataaccaggctagtagatatagaaatattagtgattttgctcaacaactgagcttattacatgatcaatttaattacctatgtcaaaagtgactattaacatacctcaagattctaaagtaactcaagttttggctaatgaagtcatatcaagtgtacacggtcttactgtatactaatcattcacttcaagtaaattagtatgatgacaacttgatatacatatattatcatagcataagctattttcaacagtgcccaaggaaaataaatgttactatagtactgatttctagtttatttgcatgactctactaactttcaatcgatttcttcaaaatcaggcctagtaaccacaaaccaaagagtttactagtggagtgaattaagaaggtttgatggtatgttaatgactttccaaaaactagcataaagtactacacataagaataaattatattaaagatttattcctatgatacttgtcttcagatgaccctaaaatgttttaccagctttgaagtacaagtattctcaaatcacaaaatcttagattagaaatagtcttagaagtcccccactgcaggaattctttataccacctcccaggcaaaatgttctccagcctttgcttgaatatttccagcaatgtgcactcactattttgcaaggcagtgcactccactgttacaaattcttccttacaatcactggaaatctgcctccctgaaccaagaatcccagttctgctctctgaaacaacacaagatatataacctttgaaataaaatcacttattaagatatagttgtcaatttcatcacacaaaatgcaattaaagctcagaaaagaagaaaccacaaccatacacaacaaaactttgaaattcaggaaattatactgaaatgacaagccagcaaatttcaggatatcaaagctcacacctcagttaacatacaaatattaagggtaacctgatgatttttttacagtggaaagtggtacagtgtttattaaatacctttttttgcaacctgatactaccaaatccaccaacaccgtttttaaaattacagttctgtaggaagttcaaggtggttttcccagttgctcgcattttcactcagtttatttctctctaaaacatctggatgttggttttttaaagcccatttgccccactggtgcaatatattgtttttaaaaataaatattttcaaaaatggagcctaagagaatggagtgtaaacgaatgggggtggggcgaggagagaaggcaaagacgggcccagcggggaaaggctggttactgggtattttccttctgagagcatgctttattggcataggcatctgaggtaacgagccatacaaacacgaccttagaacaagaatgatcacgagcaatgagtgtaaggcataaatatctgtaagacggaaataatttgacactgatcactaagcagcaccagatgcttcgggacctcataaaggaaaggtaagaggtccaggaaacagagatcattgctaccctctggggtggggggcaggcgggagaaaccaaggaataactacggttgggcagttcaaagcctgaacagtacagagcaaaagaaagccagcaagtgactaggggaaggcacacaccctggcgagtacgaagaagggtgtgcagtgtgcaaatactgaacaggtctatgaaatggtgtgggtaagagatgtgggtgtgggtaaggggcaacgcaggaggctcacggtcccctccctgcagcagagcaacagagggtaaaagaagggggagggtgaaaagcaagaatgactcattaccaaaaggaagtgctcaagccatagggaggcatgccacaggggatttcagggcgaggattgtgaggagctaggtgctcagggtgatgggggcaaaaatcaacgtcttgtagttcctgctgctagtctttaacatgggggtgtgggggggttcgcggcagccgagtgccaaggcctgggaagcggcgcggcgcgtgcgcagtggcgttcggcgggacccgctgaggcaaagcggagccgcagtgacagaagcaagcggagcggccgccaggaaggactcaccgaggcgcaggggctggaggtggtgctgggggtaggtgaccgctggaccgtgaccaaagccatctaggcgctgctgggttgttccgggcagggcattcttgtcctgagtgtgggggacgggagggtgacggagccgggatggggaaaggggtgcggggtgggggtgaagggaacggggaggaggaggaggccgcgggaacggccgcagactccgcacccaccaccagactgtcgccgactgacgctccgaacgggcggcgggcgggcggttccgcagctgcggggcacaatgagcgctcccagtgcgcaggcgccacctgtcagctaccgcctctcccctcggcgcgcgccgccgcctggtcgtaacccttgagttgccggaagctggccgagtgcgtgcgcctcgggccgccgcaccctcctgggtttcctccttcgtgctggaatcgcgcggtttgccagcactgggtgctgtggagtggggtgggggaaggggccgaagggagccagcccggtgaggggtcccagggcggggggccgctggagtcttcactcctgagagacaaccattttatgaggtggggcggcgcacagcttaaccaaccttaaaaaaaagcagctgagatgaaaatcctgaagcaaacacgttttctattgggaaagggctccgcggagtttcaaaccctctcactgggcgcagacagaactgggctagaccagtttactcccttcaccccggctctcgggggctttttcttaacttttcccccccttccgtctatgttttatgatgagacttctggaaagaaaaccattttccgtttgataccctggaaaggtttgtggtaccctcatgcttcctctattgcctgtctaaagacttattcattattcctgaggagaagagaagctgagcgcgcctgggagtccgaggaagccggttgtgagggtccagcctgctattgacctctcacttgcctcctgctgtgaagacagtcttttaattaaacaggatttgctcgttaagctttcttctccttcgtctctaaatgtcattctttcatagacctatgtaaaaatgtagattaaaagatattttaagggaatggttttctcaggggtaaattgtctgcagaacataagcaaagaatgtaatggaaaatcaagattaaaaaggaaaaaaattgcacaatgcaaatatcactgattatttacacaaagaaagagagttgacaaggctatttctcagcttgagtggatgagctggtaaataccaccgtacatatcaaagctgtagaaaacacacacacttgggagtttgcagttattaaaacccaccccctcctgtttgtcactcaaacactcttggatctcattgcttcttttaaactgacagggctgtcatgagctctttctggctgctgtacggttaaacgccacaagagtcctctgtgctgagcctttgttctctccctggggccctgtggttgaaataattagcagggaggttccatcaagaatcagacactgagggtccctgtactgtacagtcctatgtagagtgtagtgcagagaagccagctggtaggcttttgccccctggtggtgatcaggagtgcctgtgagacaaaattaaacaaagatgtatggttcacagattaaacaatctgactgtgttttccccagagctccgtagtaaacaggaaaagagaaggcaagtttcagaagtaagaactttgaaccaatgcatgggagaccaaagaggaaactagatacatagccaaaaaatacacatagctagaagctgaatgaactcaaataaatgaaatatatgtgctttatgaaccaaagtatcattctagaaaaagtaatattcaaatctgtaggtcttagtacttgtatgttgattctctgactcagggagggcaacaatgatgttctactttttcatggtaacatactcttcagaaattcttttggaagatgaaaggcttaagtccattaaccttgcagtgagaaagagcactaccataggaatcagaagacctggtttctagttccagctctaaaaccttatgcaaatggcttgaactttttgagctttaattcctttatctctacaatggaaccctaactgacaagattcttgagataatgtatggtaaagttcagaataaactgtaaataaagccctctatgcaattaagataactttttttttttttttttttgagacggagtctccctttgccacccaggctggagtgcagtggtgcaatctcggctcactgcaacctccgcctcccgggttcaagcaattctcctgcctcagcctcccgagtagctgggattacaggggcccgccaccacacccggctagtttttatatttttagtagggacggggtttcaccgtattggccaggctggtctcgaactcctgtcctcaagtgatctgcccacctcggcctcccaaagtgctaggattacagatgtgagccactgtgcccggctttttttttttttttttttttttgacacggatttttgctcttgttgcccaggctggagtgcaatggcaccatctcagctcactgcaacctccacctcccgggttcaagctattctcctgtctcagcctcctgagtagctgggattacaggcatgtgccaccacgcccggctaattttatgtctttttagtagatatgggggtttcaccatgttggtcaggctggtctcgaactcctgaccccagatgatccacctgccttggcctcacaaagtgctgggattacaggtgtgagcccccgcacccggccatcattctttttcttaatagtagaagtagattagtggtcaagacatgtttcatctgtaggtaagtgtggaacatttttgttccacatatctaaggtgataaaatcctgatcaaaattgaattatgggatgacaaaattcacattgtttgtatcaggaagttaatttattaattttcaggggaaatatctcttcctggtatataccttttaaggaaactaagatttggaaattattggtgcatgttcattaatttatttactaataattgagaaaatatttattgaatgtgtatcatatactagacactgctttaagaacaagacaaatgtttatctacctcttaggggctcaaagccaattagtaggggaaaacacatcaacaaataattagagcgtagcttagtggtaccatggcttctgtcacctcggctaggcgcgaaaggaggtatgtagaaatatagaagaagtctatatacgtacaaagttctatagaaacaaaggagagaaggtctgggcaaatgtgctctttatgatattggctttcaggctttgtctgcagatcccagtacagtcgctttgcgaacggagctggaccacactaagcatttgatgaaatctatgctttgtgccccatttatacctaatttccctaggctccaccctggttcctcctaggtcttctggtgaactgagagaggagatatcttctaatagagtgaagagcctaggatcctcttactattctagctgaatttgaggagagagaggccaagagcaggattcccaaaagagggagccaaagagacaaaagtcctcctagttctacttagagcactttcactcttcccacctgcgatgctggaggcctggttgtaccactggagtccatttaacccttaacttgtatcaatacttcttccggggtgaaattataggggagcttgaaatctctgaggttagctggttctcaagctttgagaacctgatgaaaactattgaccttctctccagaaaaatgtacttgcatatttctcatacctactaaaacctatcaaggaaccaaggtgaagaatcctgatctaaatgttaaaggggtggttctctaccttttttttccacatcatgacatccatagaaatagtatttgtacagcacactgggataaattaaaggggatttggaggcagctaattacatggggcttggtgaaaaaaattgtttctttatattacttacttttaatgacaaaaataaacatattaaggatgacactaaatattgaatttgtatacatttccaaacaaagatgtctaaaaatttaatgaaaaacctgagattgcttctgtaaacataacattttttatacaggattttatgattgaaatgacggcttgcagttcttgaatgagacagtttaacagtgatgtcttcaaattcttggtagtcattattgatgagaatttagttcatacaagtaggtgataaaaaaacttttaaacaattttcacaacaattcaaaatttaaaagtataaattataattgataatatatccacattatcacagggtatttcctcgttacatttgccaatgggaatttccccatctacccaaacactttttgtgtcaagtatctattgcaaaatattgataaaggtctaatttgcagagttagattgtgttattagatcaataattcttcatctaacttgaacataattaaaagggcgcatcagatataaacaaaaggaagaatgctatatatataaaaagagagatcataagctgagttcatcaggagtacctagcaggcctccctgcatttcctggccttatctgaggctgtaagtcctgctcttttggtacctggaacatcctccaaagctcagtgtttacaataggcagcagtgtgtactacaattgtcttgtgaaagtgatgacctggtggtagaatactccttggctttgcttggcaagaacttcattgtgctgtccaccagtgggaccatgggcatactagggtgggtattcacaccctgattttggggggctgctgagaatctctagatcacactgcttcttgccaggagtgaattacctagatttatcaaccactccagttattttaagtaactcctcaggctgaatagatccctatcttgcaatatatctataactcattcattgcataccaaatgaagtatttcacttaaaagattatgacttatatagctaagcttaagacagagcaaaaaaaaagtgagtcaaaaaaaaagacacaagaaatcatggtcctatccttgataatccaatcccttatatttgaaacaatttgggcataattataagtataaattaatatagcacagatatataagagctgagagcaactgcagtattattgagtcatgtgttgccttcacttggttgtattttttcttaagttttataaaaactttaacttttactaacttcatttaactgtgtcctgacaggagacagaaagaacaccagcttgggtggggtgtggtgcctcatgcctgtaagtccagtactttgggaggctgaggcaggaggattgcataaggctaggaatttgagagcagcctgggcagcatagtaagacctcatctctccaaaaaataccacaattagccaggtgtggtggtacacacctgcagtcctagctacttagggggctgaggtgggagaattgcttgagcccaggaggttgaggttgcagtgagctatgactgtgccattatactccagcctgggtgacagagcaagaccttgtctcaaaaaaacagaaactctaccagttatttgccaagaaattttaacaaagaattaataactagatataaagttgttaagtagatacctaaaaaagtaaaaagagaaatctgaggtatcacaatggtgagtaattcatcccaccttaagggctagaaaaaaaaaaacaaacaaacaaaaaacaagaaaaaacagaggaagcaaagggaaaaatttagaaatttagaggattggccccacagagctaaaactaaggtctctgaagagaaagtgctgctcagctggtgttagtgcctctgagattagaggaggggcttcatggcacccatggttctgagacacagacttctgaagcaggagcactggctggctggtggtggtgccttagagtaatgaaaattatagaactatagaaaaactactacaaactggattcagctgttgctacaaaaaggaaatgctgctaccaggatgaagaagcattactaggtgaaccacacaggaaccaaaaggccacaagaagcagtcagggaaaaagtggcacatatacaccatggaatactatgcagccataaaaaaggatgagttcatgtcctttgtagggacatggatgaagctggaaaccatcattctgagcaaacgatcgcaaggacaaaaaaccaaacacctcatgttctcactcataggtgggaattgaacaatgagaacacttggacacaggaaggggaatatcacacactggggcctgtcgtggggtcgggggagaggggagggatagcattaggagatatacctaatgtaaatgatgagttaatgggtgcagcacaccaacatggcacatgtatacatacataacaaacctgcacgttgtgcacatgtaccctagaacttaaagtataataataataaaaaaagaagcaatcgggatagacaagaaggagcaagtctcttgtcttcccttcaggtatgggatgtccctctggtgcccccagttagcacagtataacaaagccagctggcaaggcaaaagaaatgtgattttcagggtctcagctttagcaacaaagaagagtaaaaatgggtgaatttggagatgagacaataatttaataactggcacttgattgatagggaaattgatgccagaatggaatttatttcccatcctctggtttgcatatatctcttaaagacagttaaagaccttgctacttcctgctcctcggatacaatcagcatactttcatcaatgtgatgctgactgggaagtcaagatgctcaatatctctgtagactatattatggcagagagctagagaaatgatgtagccctgagcaagactgtgaagggatattgttggccctgccaagtaaaaccaaactgcttcaggtgtttcttgccaatttatatggagaaataagcatttttctgggacaatagctacataccaggtgtcaaggactgtgttgatttgctccaataaagatactacgtatggaagaggaggtgcaagtggaggcataatctgataaaatttacagtaatccacagtcattctccaagatccatccaccttcttcacaggccaaacaggcaagttaaattggtgtgaggtagctttcatcactcctgcttctttatttatttattttttttttgagactcctgtcgcccaggctggagtgcagtggtgcaatctcggctcactgcaacctccgcctcccaggttcaagtgattctcctacctcagcctcccaagtagctgggattacaggcatgtgccaccacgcccggctaattttcatatttttagtagagacggggtttcaccatgttgaccaggctggtctcaaactcctgacctcaggtgatccacccgcctcagcctcccaaagtgctaggattacaggcatgagacactgtgcccagcctcactcctgcttctttcagatctttaccggtttcattaatctttgtaatcccccatcctcccaaccccaaggaagcaatatttttgtttactgtcctggtgtgtttgaagggagtttgaggggaggttttcaaaggcttccacttggcccttcctactataatagtccttattccagagtcagagaaaggatatagagatcctgccagttaccagtatctctgttctaattatatattcagggactgatgaaatcaccacagggtggttctatagccctactaaaccactgtgattcaaacttgagttaagactccatctggccaccgcaaacccccacttaaccttatggactgaagtggtattttggatccccaggattaacatcagtttagaatcagtgtttagatatctctgaaaaacctggatattccttttccctagcacaaagccattttaggaaatggccatcaatctctgtggaaaagacttagaggaagatttttcagtatatactagtggcaatgctacagagctctttctcaaagggacccacctttcaattaaggaactgggtgagaggttggaattctccattgtggtgactaaaattatatttttggccctcatacaggcagacctgggagatattttgggtttggttccagaccactacaataaagagaacatcacaataaagtggtcacatgaagttttggtttcccaatgcatatataaaagttatatttatactatagtctattaagtgtgcagtaggattatgtctaaaaaatgtgcatatcttaatttaaaaatacttttttgctaaaaaatgctaacaatcgtatgagcctttatccactcaaaatctttttgctgatgcaggatcttgcctcgatgttgatagatgataactgatcagagtagtggttgctgaaggctagcatggctgtgaaaatatcttaaattaagacaattgagtttgccacattgattgactcttcctgtcttggataatttctctgtaacatttgatgctgtttgataactttttacccacagtggaacttctttcaaaattagtcagtcctgtcatatcctaccactgcttcaacaactaagtttatgtagtattctaaatcctttgttgtcatttcaatgatgttcacagtgtcttcaccaggagtgattccacctcaagaaactgctttctttgcccatctataagaagacactcctcattcattcaagttttatcatgagattgcagcaatttagtcacatcttcaggcctcacttctaattctagttcttttgctatttccattacatctgcagttacttcctccactgaagtcctggggccctcaaagtcatccatgagggttggaatcaacttcttccaaactctgttaatgctgatattttgacttccttccatgaatcacaaatgttcttaatgacatctagaatggtgaatcctttcaagaaggttttcaatttactttgcccaaatccatcagaatcatcactgtctatggaagctatagccttatgaaatgtatttcttaagcaagacttgaaagtttaaattggtctttgatccatgggctgcagaatggattctgtgttgacaggcgtgggaacaacattaattaccttgtacatttccatcagagctcttaggtgaccaagtacactgtcaatgaacagtaatattttgaaaggaatcaattttcctgagcagtagatctcaagggtgtatttaaaatattccttaagccatactgtaaacaaatgtgctgtcatccagactttgttgttccatttatagagtacaggcagaatagatttagcataattcttaagggttaagatttttgaaatgataaatgagcattggtttcaacttaaagtcaccagctgcattagccccaaacaagagagtgagcctatcctttgaagctttgaagccagacgttgacttctctccagctatgaaatcctagatagcatcttcttccaatagaaggctgtttagtctgcatggaaaatccattgtttagtgtagccaccttcattgacgatcttagttatatcttttgggtaacttgctgcaacttctacatcagcacttgcagcttcaccttgcacttttaagttatggagatgtcttctttccttaaaccccatgaatcaacttctgataattttcagcttttcctctgcagctttctcacctctctcagccttcacagaattgaagagaagttagggccttgctctggattgggctttggcttaagggaatgttgtagctgatttgatcttctatccagaccactaacactttgtccatatcagcatatctgctatatgaattcttcaaacactttttgaaccttgagtgtttgttccttctgcttcaaatttcttactagtcttttactatccagcttcctttgtgaaaatgtccctaactaccctgggaaaattaactgcttatttctctgttccttaacattttgtgtgtacctctactcttgcactttgcagattgaattgcatctctttccctcactgaactgggaactcttttttttttttttgagatggagtttcgctcattgccgaggctggagtgcaatggcatgatcttggctcgctgcaacctccgcctcccgggttcaagccattttcctgcctcagcctcctgcgtagctgggatcacaggcacctgccaacacacccagctacttttttgtatttttagtagagacagggtttcactatgttggctaggctcgtctcgaactcctgacctcaggtgatccacccgccttggcctcccaaagtgctgggattacaagcgtgagcccctgcgcccggactaaactgggaactctttaaggcaggtcttattcatccttttaagacctaacctttgcctgcatatagaaagcacctaataaagtcttattgagttgaatttatctgagtgcatccaaaccaaatagattttaaaagaaatggaaggaagcttctcagcaatttcaggagatggacaccataagcaaagaaatgaggctgttgagaatatacagttgggagctatcacataaatttattttctattatttattatttattaagtgagtcaaaaagactttgaggcagctatttttaaatgttggaaactcttctctccaaaggcagtacttttggtttatttagctagaacatgtgttatgttgataaaaagaaaagggaatggccgggtgcggtgcctcacacctgtaatcccagcactttcggaggctgaggagggtggatcacttgaggtcaggagttcaagaccagcctggccaacatggtgaaaccctgtctctactaaatgtacaaaaattagccaggcatggtggtgagcacctgtagtcccagctactcgggaggctgaggcaggagaatcacttgaacccaggaggcggaggttgcagtgagccgagattgcaccactgtactccagcccgggcgacagaatgagactctgtaaaaaaaaaaaagaaaagaaagaaaagtgaatacgctagagcattagatacatactatttcaaattagagtctctagactgtaactgtcctggaggcagactgtgtgaatataatttactctttacacaacacctagctcatatatatacaaactcttaaatgatttttggcatggcagtgatttgataatctgtgaatctacagtcatttgcagtaaagtggggatctggtaattatttattttaatacctcaatataaatgaataaaccagataagtcacattcctctggaattctcccttcccaaaaaaatgccttttgagatattattattctattctctatctacctttcttgcatgaattaggtagccataaaagtttcactttacctcaccttgttatctcaaaaattaatgaggatgacaatcacgttaaaaatgcaattgcattactgctgctgtattttttttttaatgatagtagtaatgattactatggtgagttttcttgtctccctgagcaatgatctagctttggtcagtagcaacagtcataacagtaatacagttggaaaagttcagcagttgagaatttatcattcaatagaattgtggggtgaggtgagggcaggagtgagggagcttttttaacttctggagtactttgtgatgtttattaatattttctttctttttgttattaatactggtctagtaatattcttctataccatttggtgataacttttggagtccaaatgaatgagtcagcatctcaagaggaactcagacctgctcaggttcttgtcctacataggtttatcacatttatgggaagatttgagattcaacattcttgggaaaattgagatgcaatatcacagtctatcatttaattatttctctttttggttgaagtattctgcatcaggttttgacagaaatgctgtaaaaggggtcaaaataacagttgagtcatggcgacctgcttctagttggttggcattccttgactatatataaaagtctgttattgtttgaatttgttgatacaactactttgtgtaattttatttcacatgatatttactcattatgtgaaatttttaaaaattaaaagcttactgtattaaagtatgagacagtagtttaatccacagctctttttggatgccatttactaacactgtttgcatttcaggaaaacagaaaagaagacaaagagaggaaatggaacttaactgaagtgaaagagcttcatgaggtagagttggcatgaataaatcagatattaatgctggagaataagctagataaatcaattttcttatgataaaagaaaagatgtgggtattcaaaaagataactaaaattgcaaaaggaaaaggacaaactcatgttgattattaagctgattcatttgagtaagttgcaggaaacttccatggacaggtaaattatttgtgaagaactgttataaattacagataaataaagactgctttctaaagttaccctaaaaactgtaaccaccagcttttagggtcactttactatcatgctgaaaatgtaatttccaggttaatcatttaagtaactttgtgtttaaataaatacaaggctacaataaagaagaacgtttcatagaaaaggggaggcaattaaaaatagtcctatagattcacaagtgagttgactaatatgagtttttaaaatatcctattgattgtcgatggctcacacttgtaatcccagcactctgggagaccgaggtggatcacttgaggtcaggagttcaagaccggactggccaacatagcgaaactccatctctactaataatacaaaaattatctgggcttggtggtgcatgcgtgtaatcctagcaacttgaaaggccaaggcaagataatcactttaacccaggaggcggaggttgcagtgagccgagatcatgccactgcactccagcctgggcaacagagtgaaactgcatctccaaaatatatatatatatatatatatagtcagatttttaaagtacattagcatgtatacaaaaactattttgttgctattcataaaattaatctttaatttcctcaattaagattaaatgctttttctttttgccacaaatacagaaagtgattctagtagtaaaacagtagcatttccaaaggtctgatttccttatgctatggtctcaaatcatgtttctataaactattgtataattcaagaattaatgtacatctaaaatgatattcctagcatattactttgttagtaacaggaagatgtgatgacattttgaaccaacacattttatcttgtaaatgcagaaaatacactgtgattacctctttgcttctaatatacagcattagatcccagaaaaattaactaggaatgtttggttaactcttacaaagcaattaactttcctttaattggaataatttatacaactttgttgaaaatcaagtcacattgaaattggtgatttttttcctcttttcaaagaccttacagagtgtgccagacgttcctgtaaaagaggacaccaacagtgtggtggagaaagcaatggatgaaatcaaatcccaaggtagagaactagcctttctcttatacaatagaatctaaaactggctgggcgtggtggctcatgcctgtaattccagcactttgggaggccgaggcgggtggatcatcagaggtcaggagttcgaaaccagcctggccaacatggtgaaacaccatctcttctaaaaatacaaaaaattagctgggcatagtggcgggtgcctgtaatcccagctactctggaggctgaggcaggagaattgcgtgaacagggaggtgggggttgcagtgagccaagctcgtggattgcactccagcctgggtgacagagcgaaactccatctcaaaaaaataaataaataaaagaatctaaaactatcattaacattttactggggatgcgttcttcaagattttgcattttaaagatataatttcaggggatattttattttatttttatttttagagatggatcttgccctgtacctagactgaagttcagtgacacggtcatagttcactgcagattcaaagtcctgggttcaagtgatcctcctatctcagcctccagagttgctgggactatgggcacacattacctcacctagctagttttttattttttatttttgtagagagaatttcttgctatgtttcctgggctggtctcgatctcctggactcaggcgatcctcctgtctcagcctccagagtcactgagattataggccagagggtattttaaatgcagtttgggaaacaatttaaaatgtatttcattcaccttctattaatgcttttgaggcaatttatgattattcatcttgcacttaaagagaaaatttatctaagaaagctgactgacatctagcaggcaacccactaatacaataataaaatgaagaactccagtgatttgggctgcttattgtccttggccctgtttattgtttttgggttttgttgttgtttttttgttgttttctgttttgttttgtttttttttttttgagacgaagttttgcgcttgttgcccagggcagagtgcaatggtgcaatctcggctcactgcaacctcagcctcccgggttcaagcgattctccagcctcagcctcccgagtagctgggattacaagcacgtgccatcacacccggctaagtttgtatttttaatagagatggggtttcccaatgttggccaggctggtctcaaactcccaacctcaggtgatctgcctgccttggcctaccaaagtgttgggattacaagtatgagccactgtgcccggccaacactgtttactgtttttactcctgtacttgaccacatatttattccgtttgatccaaagcttgactcctagccccatccttaacccaaattccacataattatgcagattgaaaatttataggattaaaaagtcttcaaaaaagtagagaagacattcatctctttcattacagctcttttaactccaaatacttagtgaaatccataccaccagaaattctttacaatatttaaaatttaataattttactataatttttcttcaatttaccagtattgaatgtttagtatacgctaggctgagctaggactgaagtatagcaatatcaaagtgttttctaaactataaattgatatatagatgttagttgtaatttttaggtgctgggtttttttttttccccaaagtgttcttctctctttttaaaccaactaagagtaattatttactatttcttcctagtaatacacattacaatacatattcattaaaacccgaacttgcacttgttgtggtggcttatgcctgtaatcccaggactttgggaggctgagatgggaggatcatttgaggtcaggagttcgagaccagcctgggcaacacagcaagacccaatctctaaaaaacaattttttttaagagaaaaaaaaaggaaccaaactttccttcaaattatactacaaggctatagttcctgaaatagcatggtactggtataaaagtagacacacagacataatagagaacccagaaataaaaccaaatacctacaaccaaacttgacaaagcacacagaaacataaactggggaaaggatactctatttaataaatgttgctggggaaattggctagctacatgtagaagaatgaaactgcatccctatctctcaccttatacaaaaatcaactcagtatgcatcaaaaacttaaatctaagacctgaaaccttaaaattctataaaataacctaggaaaaactcttttggacattggcttaggcaaagaatttataatgaagactccaaaagcaaatgcaataaaacaaaaaataaataaatgggacctaattcaactgaaaagcttctgtacagcaaaagaaataaccatcagactaaactgacaacccacagaatggaagaaaatatttgccatgtgtccaacaaagaactaatatccagaatctacaaagaaacaaatcagcaagaagaaaaaaataattatcccatcaaaaagtgggcaaatgacatgaacagacatttctcaaaagaatatatacaaatggccaatgaacatgtgaaaaagtgctgaacatcactaatcatcaggaaaatgcaaattaaaaccacgatgaaatactaccttactcctgcaagaaggatcattattaaaatgtcaaaaaacaatagatgttggcatggatatggtgaaaagctaatgcttgtacactgctggtgggaatgtaaattagtataacctttatggaaaagagtatggaaatttctttttttttttttttttttttttttgagacagagtctcgctctgtcacccaggctggagtgcagtggcatgatcttggctgactgcaagctccgcctcccaggttcacgccattctcctgcctcagcctcccaagtaattgggacttcaggcacctgccaccaagcctggctaattttttctatttttttagtagagactgggtttcaccatgttgggcaggatggtctcgatctcctgacctcgtgatccacccgccttggcctcccatagtgctgggattacaggcgtgagccaccacgcccggctgagtatggaaatttcttaaagacctaaaagtagatctaccattcaatctagcagccccactactgggtatctacccaaaagaaaataagtcattatattaaaaagacacctgcatatgtatgtttattgcagcacaattcacacttgcaaagatatggaaccaacctaagtgcccaccaaccaatgagtggataaacagcacttcggaaggccaaggtgggcagatcacaaggtcaagagatcgagaccatcctggtgaaaccccgtctgtactaaaaatacaaaaattagctgggtgtggtggcaggtgcctgtagtcccagttacttgggaggctgaggcaggagaattgcttgaacccaggaggcagaggttgcagtgagctgagatcacgccactgcactccagcctgacaacagagcgagactccatctcaaaaaaaaaaaaaaagaaaaagaaaatgtggtatatatacaccatggaatattactcagccataaaaaagaatgaaatgatatcttttccaacgacttggatggagctgaaggccattattctaagtgaagtaactcaagaatggaaagtcaaataccatctgttctcacttagaagtgggagctaagctatgggtatgcaaagacatgccgagcgatataatgggctatggagactcagaagtgggagggtggaaggaggggcaagggatttaaaaaaactgcatattgggtacaatgtatactactcaggtgatgggtgcactaaaatctcagacttcaccactatacaattcatccatgtaaccaaaaatcacttgtacccctgaaaatttaaaatttttttttaaaagaaccaaactttccaacacttattctgtctttcttataaacttagtactgttttcacagcttcactaacttctaaaaattttcttcctggcaagtctttacttatcctcttctacctgtccccacctcctgtttttctgattttacttccttatgccaaacatctaccaccaacaccacatacatatactttgcctttaccttaatcgcttgggccaggtttataaattaactcattcattttattttattttattttttgagatggagtcttgctctgtcgtccaggctggagtgcagtggcgcaatctcagctcactgcaacctccgcctcccgagttcaaacgattctcatgcctcagcctcccaaatagctgggattgcagccatctgccactctgcccatctaatttttgtatttttagtagagacggggtttcaccatgttggccaggctggtctcaaactcctgacctcaggtgatccgcccacctcggcctcccaaagtgctgggattacaggcttgagccaccgcgcctggcctaaattaactcattcattttaaaaatgccaaacagaattttgatataggtaatttgttataaatttaattagatgttcactttaattagtttgtggccatatttgcacctacaaaactgtacatatgtattccatcaggtaatttttcacctccccagaaaacatatcaagcaagagtttgtggtctttcctcttcttctactttcaatttctcttattgcttttcaatgtatggtagagagaaatgtgttttgtttaaatcgatttatcccagtatatgatatgtactgaaaacattgcagttgcttattctgatatcaaacacaatgcggtgtacttatttattaaataatcattatttatgattattaaaactttttactctaaatccctcatttgtgaatgtgtgtgtgtgtgtgggtatatacaaagtaggaagaggaactgttactgcaatttcaacaggtcaaaggaagtgtcttcatccttgttacatacttgtcaaaattaaagtcatgttatcttgataagcagctcccaacatgcactcaaatacatatcgttgcatagaaaatactgtggttaaatatatcatgtcagttcctcatttctttacccttgtttttctacttttcaggctgagcttaacttgcattttgagaattttttttaactatcagtttgctcagttatattcttattacacagccctaagattaagagtgttttgtaggaaactgccttttcctttatctattgaattttaattccagtggtgtttagtagtacttctttacctccttcctttgcagcagtcattctacatcatgtgccaatgttaagaaatcctgataataaggacaaagccgctgagtttcaaacagggcctgtgtttaaagaaaacatcatacagcttaagtagccctgctgggtcaattttcaccagtttaatcagcagccagacccactaatgttatatgcctccttgtgaagaaagagcctgctaagacttattacaatatgaattataattcattcctatttatgtccttaaataggctttgtactgaggctctgcccagcagtggaccatacactgagagctgaaaatgataaaagtcattataaggctagacttttcaaaatatgtacaaggaattcttttgtgtccctacttatttagttgaaagcacttatactcatagtgcctggatagttctttttatattagaaggtagaccactagagtggcgaagatgtacatattgggggcagagcttgaaaggctcttgattcttggaaaagtttaggaagatgatcctgaaaaagaattccagtgcctggcacgcagtgagaaattaatagttatttattgagtcagtatataaatgaattaatcaatcaatcttaaaaggtttaggatgtccaaccagagacctgctaaaaaatccagtacatctttgaaactattcagttaaacctctgaattaaattgcccttggggcagtgctgtaatttgtgatccatgaattcagaggtcactcagtcaaaagacagcttcatataggcttgttcagaatcctgatttgttgaccctgctgttgctgtgcttctttttcttgtttttgtggttctaagagagaagtgtttgactacagtggtaaccaaacacatgtctacttccattctgtacatcagtggggacaatgcaagcactaggattattgcttagcaaccaatgatagccaagtacactagaagagcactaacaggctgcaatgaagatggagaatgccttagttcacatgtgagtttactaatgagccatgacagatgggtagatattaagttgccatatatccttaatgcaggaggaggaattgtctgccttgggttatgggagacaggttaaaaggaaagagtacagttgactcttggacaacacagtttgaattgcatgggtccacttatacacagattttcttccacctctgccactccaaaacagcaagatcaacccttcctcttcctcctctcctcagtctatcgaacatgaggacaatgagaatgaaaacatttatgatgatctgcttctacttaatgaatagtaaatatattttatcttccttatgatatccttcctttcttcctttccttccttccttccttcctctcttccttccttccctccttccctctctctctccctccttccttcctcctccccaccacctctctctttctttcttttttaaaaaaatacagatacatggtctcactctgtggcctaagctggagtatagtggtgcaatcatagctcactgcagtctctccctcctgggctcaagggatcctcctgcctcagcctcctgagcagctgggactacaggcatgtacaccacacccacctaagtttttaatttttttttgcagagactgggtcttgctatgttgcccagagtggtcttgagctcctggcctcaagtgatcatcctgcctcagcctcccgaagcgctgggattacagatgtgagccactgcacctagcctcttatgattttcttcataacattttctttctctagcttactttattataagaatacagtatataatacacatagcatacaaaatatgtgttaatcaactgcttatgttttcagtaaggtttctggtcaacagtaggctactagcagtcaaattttgggggagttgaaagttatacataggtttttgactgtgcagatattgcttcctctaactcctacattgttcaagggtcaactgtacattagaacctatagacttgaatgaattcctttctttttacacttatttaaaaataaaaataaaagcattatatatttatgagcattgtgacaaaacagaagggaaacacacctttccctcttcccccacccaaagcagttaataagtttgcaaatccaacttagagttgaagggaagcattatactaccctctttacttttcccatattggaataagagaagaggccaaggaagaaatcaaaacttgggagagagattgataaatactatccactgttagatttaagacattctgtagatgaaatgttggcttttcaagggtttcttcacagaccaatttttctcctggacagaaagatggatactatctaaataagatttaaaagtattcttcaggatattgtttttttgtttttgttttgttttgtttggtttggttttgagacggagtctttctctgtctcccaggctggagtgcagtggggcgatctccgctcactgcaacctccacctcctgggatcatgccattctcctgcctcagcctcccaagtagctgggaccacaggtgcccgccaccacacctggctaattttttgtatttttttttttatttttttttttagtagagacggggtttcaccatgttagccaggatggtctcaatctcctgaccttgtgatctgcccgccttggcctcccaaagtgctgggattacaggtgtgagccaccgcacccagccaggatattggtttttaaacttttctaaggcaggaaaaccttttttttcaaatgaaaatttcctatgctctacaattatgtaaaacaaattgaagcatagctgttccagtcacaaacagtacaaggggcttagagtcctatggcctttgaaactccctcttgggaccctgagaagcatagttcaaaaaccactgctctacagtaggaactcttattcttgcaggtggtgacataaattggaaccaatcactctgggaaataatttaataatatctccttaaggtgaaatgcacatacttatgaccctgtgccagtctgttcctgctgctataacaaaatagcatagactgggtaatttataaacagtgtaaatttagtgctcacagttatggaggctgggaagtccaagatcaaggcaccagcaagtttcatgtctggtaagggccttgtctctgcttcctagatggcaccttgaacattgtgtcctccagaggagatgaacactgtcctcacatggcagaatagatggaagggcaaaaaaaagggaggttcctagctagttccctccagcccttttagaaaggtactgttaatccattcttgaaggcaaagccctcatgacttaatcacttccctaaaggtaccaccttttaatactatcacattgggtcttaggttccaacatatgaattttggaggaacacatacattcaaaacataccacctacaattgaaatcctagtaattatataccagagaaaccctcacatgtggacacaaagagacatatgcaatacttttcataataggattgtctttatagtaaaaaaagaaaaactggaaataacccagtctatctaaaagagaatgaataagcacattacaatacagttatatcataaggtattatgcagcagtgaaaatgaatgaactagacctatacctttcaatatagatgaatcttccaaatactaagtataaaaaagactgtagaatatatatagtatgaaattttttatgaaattaaaaaacaagaacaatgttgtattccttagatagaataaaaataagtgcatggaaatgataaacatgaaattcagaatagtctatctctcaaagtagcagtctatgggaggctttaatatataggtaatttttttcttaagctaagagtagatacatgctacttattatatcatcattatacttgcaggtctttaatattttgtaataagtaaggttaaaaaaactgctctagagttataaaaattcttatctcttgctattattatatgatattatttattgagagttattaatgattgaagcacatcttaataactactttccagttaaggttaaaaatagcgagtttacctggccagaacaatcaggcaagagaaataaataaggggcacccaaataggaagaaaggaagtcaaactatccctgtttgcacactacatgatcctatatctagaaaatgccatattcagcccaaaagctccttaaggtgataacctcagcaaagtctcaggatacaaaatcaacgtacaaaaatcattagcattcctatacaccaacaacagtaaagccaagaaccaaatcaggaacacagtcccattcacaattgccacaaaaaaaataaaataaaatacagctaaccaagtgatatgatttgactgtgtccccacccaaatattgaattgtagctcccataattcccatgtgtcatgggaggacccagttgcaggtaattgaatcgtggggagcaggtcttttccatgctgttctcatgatagtgagtaagtcttacaagatctgatggtcttataaaggggagttcccctgcacatgctctctctctcttacttgccaccatgtaagacctgactttgctccttctttgccttccaccgtcattgtgaggcctccccagccacatggaactgtgagtccattaaacttttttctttataaattacccagtctcaggtatgtctttattagtagcatgagaacagactaatacagtaaattggtgccagaactggcatgctactgtaaatatacccagaaatgtggaagcgactttggaactgggtaacaagaagaggttggaacagtttgtagagctcagaagaagtcagaaagttgtgggaaagttggaacttcctagagacttgttgaacggctttggccaaagtgcttatagtgatatggacaataaagttcagactgatgtggtctcagatggagatgaggaacttgttgggaactggagcaaaggtgacttgctatgttttagcagagactggcagcattttgcccctgccctagagatctgtggaactttgaacttgagagataatttagggtatctgggggaagaaatttctaagcagtgaagggttcaagaggaagcagagcataaaagtttgaaaattttgcagcctgactactatgcaatagtactatgtgtagtactatgcaataaaaaagaaaaccccattttctggggagaaattcaagccagctgcagaaatttgcataagtaacaaggagccacattttaatcaccaagacatgtgtagaaaatgtctctggggcatgtcagagaccttcatggcagcctctcccatcacaggtccagaggcctaggagggaaaatggtttcataggtcgggcccagggacccccttgctgtgtgcagccttgggacttggtgccctgcatcccatccactccagctgtggctaaaagggaccaatgtacagctcaggccattgcttcagcaggtgcaagccctaaaccttggcagcttccacatggtgctgggcctgtgggtgtgcagaaatcaagaactgaggtttgggaacctctgcctagatttcaaggatgtatgaaactcctggatgtccagggagaagtttgctgcagggatggagccctcatggagtacctctactagggcagtgtggcagggaaatgtggagttggagcccccacgcagagtccctgctggggcaccacctagtggagctatgagaatatggccaccatcttccaaaccccagaatgatagattcaccgacagcttgcatcgtgcacctggaaaagccagagacgttcaatgctagcctgtgaaagcagccagaaggggagctgtaccctgcaaagccacaggggcagagctgcccaaggctgtgggagcccacctcttacatcagtgtgacctggatgtgagacacagagtcaaacgagatcatttcagagatttaagattttactgccctgttgtattttggacttgcatggagcctgtagcccctttgttttgcccaatttctcccatttggaatggatgtatacccaatgcctgtacccccattgtatctaggaagtaactaacttgcttttgattttacaggctcataggcagaagggacttgccttgtctcagatgagactttggactgtggacttttgagttaatgctgaaatgagttaagactttaggggactgttggaaagggatgattggttttggaatgagggaacatgagatttgggaggggccggggcagaatgatatggtttggctgtgtccctacccaaatcttgaactatagctcccataattcccacgtgtcatgggagggacctggtgggagttaattgaatcataggggtgggtcttttccatgctgttctcatgatagtgaataaatctcacaagatctgatggttttataaaggggagttcccctgcgcatgctctgtctcttgcctgctgccatgtaagacatgactttgctccttctttgctttccaccatgattgtgaggcctccccagccacgtggaactgtgagtcccttaattttttttttctttataaattacccagtctgggatatgcctttattagctgcatgagagcagactaatacaccaaggaagtgaaagatctctacaaggagaactacaaaacactgctcaaagaaatcagagatgacacaaatggaaaaacatttcatgctcatgtattggaagaatcaatgttgttaaaatggccatacttcccaaagaaatttatagattcaataaaattcctgttaaactaccaatgacattcttcacagaactaaaaaaaaaaaactattctaaaatttatgtggaaccaaaaaacagctcgagtagccaagcaatcttaagcaaaaagaacaaacctggaggtatcatgctacctgagttcaaactatatacagggctacagtaatccaagcagtatggtactggtacaaaagcagacaaatagaccaatggaacagaatagagaacccagaaataaggccacacacctacaactatctgatctttgacaaagctgacaaaaacaaacaatggggacagagcttcctattcaataaatggtgttgggataactggctagccatatgcagaatattgaaacagttttttagggaatagccaaatctggaatctattaaattgtctatcaacagtagaataaataaattgtaatatagttatacaataatatactacgtagcaatgaataacaactgttaaaagaaaagctttagacaaattgaacagagtgtaattgaacaaagaacaattcaggaatcaggcagcttccagaaccagaaaaggatcagagcaactccagggctatcacaaggtcacatgacatttatggacacaaaaaggaaagtgatgtacagaaaacagaagtgaagtgcagaaacagctagattggttacaactgggcacttgccttatttgaagctggtttgaacagctgactgtctgtggttgacagaagtttggctgctgtgattggctcacactcagctacttgttacaacagtaggttatggtctttttacacatcaagtttggttacagttcactatgtatggagaaacctttaggccaaactgaaaatttgtatggatgcagctttagaccaaacttgatttaacacaactaatgccacacaacatgaccctaagtggttatgttgttgagtaacaacagatataaaagagcacatactctgtgattccgttaatatgaggttcaaaagcaagcaaaattaacctgtagtgttagaagtcacgggagtgattgaaagaaggaaagcggggagggagggagagagagaaagaaagagagaggtgggctggggagagagaaaaagagaaatcctgcaaataaggataatttgacttctttctttccattttggatgcattttatttctttatcttatctgattactctagctaggactccagtactatgttgaataacaatggtaaaaatgggcatccttattttgctccagattttagaggaaaagctgtcattttttttccattcagtgtgatactagctgtgggtctgtcatatatggcttttattctgttgaggtatattccttctatacccagtgttttgagggattttattatgaagagctgttgaatttcatcaaatgcttttttggcatcatttgaaatgatcatatggtttttgtctttcattctgttgatatgatgtgtcacagtgattaacttacatatattgaaccatctttgcatcccttgcatccctggcatgatgagggatttttttttaatttttattttattttaagttccaggatacatgtgcagtacatgcaggtttgttacataggtaaacatgtgctatggttgtttgctgcacctatcaaaccatcacctaggtattaagccccacatgtattagctgtttatcctgatgctcttcctcatcctacacccctccaacaggccccagtgtatgttgttcccctccctgtgtccatgtgttctcactattcagttcccacttataagtgagaacatgcggtgtttggttttttgctcctgtgttagtttgttgaggataatgacttccagctccatccatgtccctgcaaaggacatgatctcattcctttttatggctgcatagtattccatagtatatatgtaccacattttctttatccattctatcattgatgagtatttgggttgattccatgtctttgctattgagaatagagctgtaatgaacatatgtgttaatgtatctttataacagaatgatttatattcctttgggtatatactatatacccagcaatgggattgctgggtcaaatggtatttctggttctagatctttgaggaatcaccacactgtcttccacaatagttgaactaatttacattcccaccaacagtgtaaaagtgttcctatttctccacagccttgccagcatctgttgtggctttactttttaataattgccaatgaattatctttttaatgtgttgttgaatttggtttgctagtattttgtggaggattttgcttcaatgttcataagactaaagaaatatctgactacagaaatattggcctgtaattttattttattaagaaaaaaatattgtagctgaatattgttatctttttctggaaaatcttctgtttttatccttttaaataaactttctacccaaatctctctctctaccttctctttaaggtcaataactcttaacttggtccttttgagtctattttctagatactgcagtcatgcttagttcttttttatagttttgtctcctctgactgtgtattttcaaatagcctgtcttcaagctcactaattcttctgcttgatcaatactgcaactgagggaacatcatacattcttcagtacattaattgaatttttcagctccagaatttctgcttgatttttaaaagatatttcaatctgtttgttaaatttatctgatacaattctgaattccttctctgtgctatcttgaatttcattgagcttcctcaaaacagctattttgaattctctgtctgaaaggtcagatatctctgtgactctgggattggtcactgtgttctcttactttgtttgataaggtcatgatgtttgtggatgttcattgatgtctgggcattgaagagttaggtacttactgtggtcttcacagtctgggcttgtttgtacccatccttcttgggaatgctttctaagtattcaaagggaattgagtgttgtgatctaagccttcagtcactgcagccatatctgcattagagggcaccccaaacccactaacactgtgaatcttgaagccttgtagaggtactgccttggttgtcttgggtaagatccaggagaattcccgggattaccaggcagagactcttgttctcttcccttacatctccccaaccccctgccaaaatggagtctgtctctctctctgtgctgagctgcctggacttatgggaagagtgacacaagccccgctgtggccaccatcactgggactgtgccaggtccaacctgaagccggcacagtactgagtctcacccaaggcctttggtaactattgtctggctactgctgatgtttattcaaggcccaagggctctttagtcagcagctagtaaattcagcctgtgtctttcccttcagggcaacgagttcctttctggcccagagtgagtctagaaatgctgtccaggaactagagcctagagttgatacatttagaaatctacttggtgtttcattttactgtagcttagcaggcacccaagttgcaagacaatatgctttttactcttccctcttttttcttcaagcagaaggagtcttttccatgaccaccacagctgggaatgtactgggtcatacctgaagcctgcacggcactgggtctcacccaaggcagtgagtactgcctggctaccactgatgtttattcaaggcccatgggcactttagtcatcaggtgatgaatcctactgggtcctttccttcaagagagtagattcccttctggcccaggatgtgtctaaaattgtcatctgggaggcagggcctagcatggggactccaggactctgcttggtactttattttactgtagcagagctggtatccaagttgcaagacaaagccctctttactgtcctttctcctttccttaattggaaggagtctctgccgaagctacgagctgcactgtctggagttgggggaggggtgacacaaccactcccttggctgccctagctggtgtctcactaggtcatgtacaccccaagtccactggctttgagcccagtacagcaccaagacttgcccaggaactacagtccttatagcctagatttcctttcaagtttatttagaaccccagagcactttagccctcagtggtgggctagctggaactcaggtactgactgctgggatggaaaattcccctctggccagggctggtctaaatgctccctctgtgggcaccagctgaattctaccccatgttgctttccactgtgacagggcaacactgcgtgacaatgcaaaatcccacagtcactgtgctctccctgccccaagcatcatattctgtctctgtactgtgaggccactgctgggggatggaggaggggtggtatacgcatttcaagactgtctttcctattctcagtgcctctttccttgatatgatattaaaaccaggtattgtgatcagtcacctgatttttggttcttatgaaggtgctttcttgtgtggatagtggttcaatgtggtgttcctgtgagggggatgatcactggagggttctgttaggccatcttgctctgcctctctcaaaatttcattttttgaaatattttattttaagttctgggatacatgtgcaggatgtgcaggtttgttacataggtaaacatgtgccatggttgtttggtgcacctatcaacccgtcacctaggtattaagccccacatgcattagctatttatcctgatgctctccttcccctacccccaaaatttcattttttcaatgggtgaatgatatttcattgtacatctatacctcattttgtttacccattcatctgtgaatggatgcttgagttgtttccacttttactgattatgtatactgctgccatgaacactgatgtgcaagtatctgggcccctgctttcaatttttttggatatatacatagaagtgggatttctgggtcatatgtagttctaggtttaccttaaaaaattaaactatattactattattgattattattattatttttttaagagacagggtcttggtatgctacctaggctggaattgaactcctgggcttaagcaatcctcccacctcagcctgccaagtatctgggactacaggcacatgccactgtacccagctctacgtttaatgttttgagaagccacaagagttttccacaatagctgcatcactttgcattcccaccagcaaagcatgagagttccaatttctgtacattcttaccaacactcgttattttctgagtttctgtttgtttttgttttcttataaccatcttagtaaatgtgaagtggtatctcattgtagttatgatttgcattccctaataactcataatgttgaacatcttttcatgtacttattgaccatttgtatattttcttaggagaaatgtctgttcaaatcctttgcccatttttgaattaggttgttttattgttattgagttttagaagttctttatatattctgaatattaattccttatcagttatatgctttacaaatattttctctcatttaccacatcatcttttcactttttgacataattctttgatgtacaaaagttttttaattttaaagtatattttatctttttttgtttgttttctgtgctcttggtgttatatccatgaagtcattgttaaagccagtggcatgaagattttccacaggttttcatttttcatctaagagttgtatggttttgtttgtttgtttttagagacacagtctcactctgttgcccagggtagagtgcagtggcatgatcatggcccactgcaaccttgacctcctgggctgaagtgatcccctcctacctcagcttcccaagtagctgggactataggtgtgcatcaccaagcctggctaatttgtttttttaattttttgtagagacacagtctcactatgttgcccaagctgggaaagtcatatcgtttactctcttcagtttagatctttgatttgttttcagttcatttttgtatataaggtaaaggaccaacttcattcttttacacgatgtatcaggtagtctcagtaccacttcttgaaaagattattctttccctattgaatggtcttgacacccttgtcacaaatcaattgactatatatgagagtttatttctggtctctctatcctattttattagtctatatgtctgtccttactccagtactgttttatttgttgtagctttgtagtaagtctcagagttgggtagtgtgaatccttcaagtttgttccttttgttttttcaagatttattttggctattcaagggcctctgcagtttcatattaatctgaggatcactttttctatttctgtgaaaaagactattggaattttgattgcattgaatctgtagatcactttgggtagaattgatatcttaacaatgtaaagtattcctatctatgaatagggacatctttctatttatttatgttttctttaatttctttcagcaatgttttatagtttttagcatatatctttcacttccttggttaaatttattcctaagtattctattcttttagctgcttttataaatggaattgctttcctttttccccctgtttttatttttttagagatagggtctcactctgttgcccagattggactgcagtgatgtaatcatagctcactgcacccttgaactcctgggctcaagcaattctcccacctcagctaccaacagctgggactacgggtacgtgccaccatgcctggctttttttttttttttttttagacagggtctcggtatgttgccctattgaatttgttcaatagctctagtagctttcttatggattctttctatatataggatcatgtcatctgtgaaaggagacagttttacctgtttctttccaatttggatgccttttgtttgttcttcttgtcttatagctctggctagaactctggtatgatgttgaacagcagtggtgaaagtaggcattcttttcttgttactcattttagggagaaagctttcagtgttccattactgagtgtcgtgttaactgtgaactttttatttttatttttgttttgagatagggtcactttctgtctcccagaccagagtgagtggcatgattatggctcactgaagcctcaaactccagggttcaagtgatcctcccaccttagccccccaagtagctgggactataggcatgtgctaccacacccagctaattcttaaattttttgtagagacaggatctcactatgttacccaggctggtcttgaactcctggactcaagcaattctcccacctcagcctcctaaagtgctgggattagaggcatgagccaccacacctggccaactgtggatttttaaataactacctttattatttttaggaatgttctctccatatgcattgattatgtggcttttttccccttcattttatgaatgtaatggattacattgcttgattttcttatgttgagccacctttgcattcctgagataaatctggaaagatttcatgttgaaaaggcttttactatggtcttggatttgatttgttaatattttgttgaggatttttgcatctatattcataaggaatattggcctataattttactgtgatatctatctagctttagtatcagagtaattctatcctcatagaaagaattaggaagtgttcccacctcttcaattttttacaagcatttggtaagagttcatttcaattcttctttaaatatttgatagaagtcactagtgaagccatctgatccaagacttttctttgttgggaagtttctgatcactgattcaatctctttacttgttagaggtctgatatggtttgaatgtgtgtcccttccaaatctcatgttgaaatgtgacctgtgatgttggaagtgggcctagtgggaggtttttgggttatggggtggatccctcatgaatggtttggtgctgttcttgcagtaatgagtgagttctcactctatgagttcatgtgagatctggttgtttaaaagagcctggtaccccttccctctctctctcttgctccctctctcaccatgtgatatgccagccccgcccccaccttccaccatgattataagcttcttgaggcctcactgggaacagatgctggcactgtttcacacacagcctgcagaaccatgagccaaataaacctcttttctttgtaaattactcagtctcaggtattcctttttttttcaggtatttctttatagcgacacaaaataaactaactaacacaagatctgttgagactttctacttcttcttgagtcagtttaggtaatttcaaggaattggttcatttcttctaggttatccaatatgttagcataaaattgctcatagtattctcttataatcgtttttgttttccaagacagagtcttgctctgttgcccagagctggagtgcaatggtgtgatctcggctcactgtaacctccaccttctgggttcaagcaattctcctgcctcagcctcccaagtagctgggtttacaggtgcatgccaccacacctggctaatttttgtaattttagtagagacgggttttcaccatgttggccaagctggtctcgaactcctgacctcatgatctgcctgccttggcctcccaaagtgctgggattacaggtgtgagccaccgcgcccagcttataattgttttttgtttttgttttttaatctctgtaaggttggtgataatgtccccactttcatttctgattttggttatttatgtatctttgctaatgtttttttcagtctagctcaaggtttattcattctgttgattttttcaaagaaccaatttttggttaaattgtttttctctactatttttctattctctcttttgtttatctctactttaacctttattattttctttcttttgctagttttgtgtttagtttgcactactttttcgagtttcttaaggtgtataggttacttatttgactttttttttttcttttttgagacagagtctcactctgtcgtccaggctagagtgcagtggcctgatctcggctcactgcaagctctgccttccgggttcacaccattctcctgcctcagcctgccgagtagttcggactacaggcgcctgccaccacatccggctaattttttttttttaatttacagagatggggtttcatcgtgttatccagtatggtctcggtctcctgaccttggatttgacttttttaaatgtaatcacttacagctatgtttccatctgagcccttttttcactgcatcctataaattttgatatgttgtgtatttattttcatttgtctcttattattttctaatatcccttgtgatttttttgacccattagtcatgtaagaatgagttgtttattttctgtagctttgtgcgttttctagttttcctttattgatttctaacttcatcaagctttgtgctcttcattaaagagcagatattttatatggtatctatttttttaaatccattgagactagttttgtggcctaacatatggtctatcctggagaatgtgccatgtgcacttgagaaaaatatgtattctgctgttatattgggtagactattgtatatatgactgttaggactaattttaattttcatatatggtgtaaggtaggcatccagattcatccctttgcatgtagatatcagttgtcatggcaccgtttgttgaagagactgttttttccatgaaattgttttggtaccgttgtcaaaaatcaattggtttcagagtacaagaggaactttaaaaaatgtaatcaattggtcatagatgtatgggtttatttctggactctcaattttattccattgatctatgtgtctatccttatgccagtactacttcagtaaagttttatagctttcttcatattagtctgacacatttctgtttagtttatttctagatattttaaatttttgttgctataatgacatgaagctttataaaattatattttcattgataactaaaaatataaaacattttaaattggttattaattggtagttccaaggaaataaatttacttttgtattttaatctcgtatcctgtgtttatttggtaggcttttaaaaaaatcgtggtaaatacatatatcataatatttaccatttaaactgtgttaaagtgtacaattcagagccattaagtaaattcacagtgttatgcaaccattaccactgtctagttccagaaagtttttatcattacaaatggaaactccatttagtaagcctttcaaagctgaagatttgtgtctttcttcagttctgagagatttcttacattatttatttgaatatttcattatgtctaacacttggcttacaccttctgacacttttataagattaatattaaatgttctggattggctgggcatggtggttcatgcctgtaatcctagcactttgggaggccaaggtgggtgaatcacttgaagccaggagttcaagaccagcctaagcaacatagtaagactttgtctttatcaaaaaagaaaaaaatacaaaaattcgctgggcatggtggcatgcacctgtagtcccagctacttgggaggctgagtatatgctgtcatatactcatatacgtatacatatgggtatatggtgtcaacatgatgtgttactgttgatgttaataatgattgttaggctgtgatagtatttgtcaggtttctctactgtaaagttattttccctctcccatttccatattgtactctttgagaggaagtcactatatgcagtccgcacttaaagagaggggagtcatgctcaacatccttgagtgtggagtatctacataaattatttggactatttctgcacaggaaatttgtctttttacttatttactatagttttttttttcagcacttccttactttctggcactacaagatattccaggcactacaagatattcttgtatatatttcctatatacaacatgagcccaatcctataatcagctgtatctccaaggagttctgatttttttaattggagagtgatattagaaaccaagatgtgagcactagatggtctacgttctcttaagtgttctttttaataacttttaatttcttctaatttctctgctctgaggatattcttttaaagactccttacatttgttctatttaatggtatttccttgggtggcattagttattctgtttgttgaatttagtcatggggatgatttttcttaaacattctgtgaatgtgtgcttacatttgaatttgagattctctatttgctttcctatagagttactgttttctatagtctgatgccagtgggggaaggacaagatgtgcagacagtgaagctgtcaataggtcattttctctgcgtgtggaaatcttgcttctctagcctaaacatctatataccttaactcagtgcaggggaaaacccttctggtgcctgatgattagctcaaatgggaattaagatacacaaaaaggtcagtctttctcctatgacccatatctacatcctctaaacttggggtgcctcaaatctgctcccaaattttatagtggtctccaccgtatctttttagtcctatagtttcttcaatcagttgaattcccctgctttacatttttcagagatcttcaaaattcctgactcctgaaggcccccttcatgattgtagtattcttgcgcattttttaaattttaaaaacatacacacaacttttcctgtcattgctagagattttggtaggggaggggatataggtgcctgttctcagtctaccatcttggtctaatatctccgtcctgcatttaaaaaatgaagacataaaggaagctgggaataaaatgaagagaaatgtatttaaatatacatgtgtggtagactctttgcttactcaccacacatttcctcaccttttttttttttttttttgagacaaagtctcactggagtgcagtggcatgatcgtggctcactgcagcctcgacctccagggcttaagtgatcctcccacctcagcctcctgagtagttgggaccacaggtgtacgccaccatgcctggctaatttttttattgtttgtagaaacagcatcttcctaatgttgcgtaggctggtcttgaactccagggctcaagcagtcctcccgccttggcctcccaaaatgttgggattacaaatgtgagccactgcgcccagccttccctacctttttgcctgccaactgaacctcagtgttgtagcagatgaaaatcacttgttatcagagaatttgaaccaaaccctggcaccaagaaataagttataatttgtctatactattcatagtaatcccatttccctttaccagcgattggtctgggcgtgggcatgtatcctagttagggcagatgaaatgtaaagggaagtcttagagtggggagtctgggatcttctcctcttggataataaaacagagcctcaagaggagaaaaaccctttgtcctctatgcttttttgctgtgaggaagtgatggctggagctctaatagtcgtcatgtgatcatgaggtacaagcaaaaaaatgaacgaaaataaacagaaacagcctacgtatttaatgaaatcactgaactgctaaatggcttctgattaagtcaacaataaatgtctttatggttaaagtcactttgtctgattttctgttattttcagctgacattcttccaatccactgtgtaaatggatataaaaattttttcaaatattattctaaagtcacatagattaaaatttacttctaacatttcttacatttcacttttttttcccctcagaattaaacctggaggggcagcgaaaaatttcacctggttcaataaaggactctaaaactgaagcctcaggtaatattgcaattagaaaatctgcaaaagtgatttttgctttagatgaaactgaactgaaatcaaagccagagcacacatggaagaaaaacctttttgaaagaatggaggcaagagcccaagcaatgcagcagaaaataatagataaggaaaatctgaagaaggaactagaaaaaaaggctgaaaaaaaactccctagggataatttggccaaagagtggtttaatactgacagcatgacactgaataatactgcatatttgcttgacaaacttctacccaccttagttcctggagtagaaaacatgttaactcaagtagaaaagaagaaggttttgacagaagctgatactccaagcaagtttgacccaattaattatttgggggaatatttaataagaaacaatcctaattatatcaaagacccaggaatgtctggttaccagaggttgatgaaagaagtcacagaagacctgaagatatatgttcctgacactatctgcaacaggtacaatctgttatagtttcagttcatgatctgtctccttacattgaaaaactagtagaaaaaataacataatcatggacaggacttaaaacaagtgattctacagttattcagaaagtatttattgagctactagtatgtgcttcactctttttgaggcactgtgaagactaacaaaataaataagttccttgtattcatagatttaattatctcactatgactgcaagtgtataatgatttgtatttttatttatctgcctgcactggaaagtaagctatatgaaagttggaactttttaaaaatttaattttccatataggcaatctggtttaaaggtcaatatgtaaaaaaagttatatagtgaaaagtttccctcccattcttatcttccatctacccaatattccacctccaccataaataactactattcttaattttctatagatccttatagaatttctttatacatacataaggaaatgcaaacatggattattaattttttcttttacacaaaagcatgtgatacatgttacaaatacccatttttacctgccatttatcttttttcatgtagaagattttttatttctatatagtcaaatttaacttttcttttatggcatcaggattttgaggcactgttacatttcaaaatattaaaagaattcttccatgttctcttccagaattattattttaattttcattttaaatactgactcatttggaatttaacctactgtaacatgtaaggattcaactttatcctttttcaaatgtctacttagtggtcccaataagagttgagtagtctatctttgccccactggtttgggattgagcctttattaataaattcatatatattttggggtgtatttctgcatttttccatcctattccattggtcagtctccctttcatgcattcgtaccacactgctttaacaattgagacttttaaatatattccatagatctgacagtgctggtccccactatttgctcttcttcttttctgatgtttcctggctatttttgtttgtttactttttttatatgaattatgggagtaacttgtctacttgaaaaaaaatggggagggaaaacgaaaagacaaaccttacaggaatttttattgaaatctgattacatctattaatactcttagaaaaccaacatcttcaaggctgcaattagccaaaattacaccactgcactccagcctgggtaccagagcgagatccagtctcaaaaacagacacacacacacacacacacacacacacacatacacacacacacacacacacacaccagaaaaccaacatctgtaataatgatgagtgtttcggggtgtctttccatttgctcatcttattttgtgtgaattattgttgccctaaagttttttgcagctgggcatggtagctcacgcctgtaatcccagcactttgggaggccaagacaggctgatcacctgaggtcaggagttcaagaccagcctggccaacatggcaaaaccctgtctctactaaaaatgcaaaaattagcccagcgtggtgatgcatgcctgtaatccccgctacttgggacgctgaggtgggagaatcacttgaacctgggaggcggaggctgcagtgagccgagatgcaccactacactccagcctgggcaacagagtgagaccccatctcaaaaaaaaaaaaagattttaatgtaggttttgtatctcttttattagattcattactagttatttttatcattctttgttgctattttaagcagggctttcttctgttactatattttctatctggatgtagtctgaagacatgaaagctactaatttctatatatttttgtaccctgctaccttactgagttctcttacagtaacattttagttggtttcttgggttttctagggaggtaaccattgtctgcaaataatagtagtttcccttcttccttttcaatttttatactaatatcctactacctccaatacaatattaaataataatggtgatatgggcatccttgtctttttacaactttagtagaaatgctgcttctgttactgcttcattatgggcagtttttatattactagttctgttccatttggatatgaaaaacattttatctcaatgggaaaatgtacctaatttctacctttcagagtgatttttaaaaattaagacttgattttatcaaatgctttttcaacacctatgaaagtgataatatgattttcaccttagattccttaatgatgaattttactaatagatttcctactattcaattaccttagaattcctgaaataaatcctgcttggttgctatgtatttgggtacactgaaatatgctttctacttgtaagacagaatatttctttccttttaattacagatttttcagaatacggtatatatctatctacctatcaatagtcaccactagtggcagcaaatgaaaaatgttttccccttttgggaaagggttcctttttcagtatcatcatggatgcatggattttaatatatattcaatatattttaatcagttatagtctttttttctgttagatgctcaaattgcaccaactttggcttctgttttctgacattacccctttagtctttgaaaacgtcatgcatttttttttttaaatggagtctcgctctgtcgcccaggctggagtgcagtggcgtgatctcggctcactgcaagctctgcctcccgggttcacgccattctcctacctcagcctcccgagtagctgggactacaggcacccgccaccacgcccggctaattttttttttttttttttgtatttttagtagacatggggtttcaccgccttagccagggtggtctcgatctcctgacctcgtgatccgcccgcctcggcttcccaaagtgctggtattacaggcgtgagtcaccgcgcccggcccaggcattttttaaatggattcctggctccttttaaaatggggatcactcacttgtgagctaggagtgctcataaatattgtgtagtcattgtttctaggcccttcaggactaaaacatataatttttagagtcaatgacccgtgaccagacatcacctgcagcctcttcaggcgtgccaccgctgccgggcctgctgtacgacccgcgggctctgggccatgcctgctcttgcgcccggctcaggaggacccttcttgatccaggagtggaccctggtctcattggagccagttggggtcttgtggcggcctgttagggatgtgatccagcgctttggaggcagggcttcaagctggtagggatgaagatcctgtggccggccagaaagcgtccttgctgaacactaccaggacctgcgaaggaagcccctctacccagccctccttagctatgtgagctccaggcctgttgatggccatggtctgggaagggtacaatgtgatccatgcctcgagggccatgatagataccctgacagggttgaggctgactctgtgaccatatggggagacttcagcgacgtccacatcagcaggaacatcattcacaccagctattcagggtagggggtcagaaagagatccagctgtggtttgaaagcagtgagctggtgaactagctcccctagacaggggccactgcaggagcgtcttcccagccagagggctcaggctccccttggccaccccagccttggtccaccaggaccaactacttctgtcacaggaacccaagcccacactcctacaagtctctcccaaaccacttccctgtgtacattctgccctaccccaccctggaggactttgagccacaaactttatgtgcctttctgtatcttagccagcacaagattgggccaaatcctttctgcaccaaactgccagacaacctttggggtgtcttcaaaagtgggtaaggcaacctctcctcccgcaaaagggagacattaaaattcgctgtgctgagaaaagaaatatgtaatttaaaaaatgagttaatattgacagttgcatattaatgtttcaggtctttatctaatttctttgacatttatatttcctttttcctttttttttttttttttgagacagagacttgctctgtcacccaggccggagtgcagtggcgggatcttggctcactgcaacctctgcctctgggttcaagaaattctctgcctcagcctcctgagtagctgggattacaggcacccgccactacaccctgctaatttttgtatttttcgtagagacagggtttcaccatattggccaggctgatcttgaacccctgacctcgtgatccacccgcctcggcctcccaaagtgctgggattacaggcgtgagccaccgcgcctggcctgtatttccttttatcttacatagaaaatcttggttcctaatgacattgacataattactgatttgttttatcctacagtttacataaaagcttcaaaatggcccagcgcggtggctcaagcctgtaatcccaggactttgggaggtcaagatgggtgaatcacctgaggtcaggagttcgagacctccctggccaacatggtgaaaccctgtcttactaaaaatacaaaaattaactgagtgtggtggtgtgtgcctgtaatcccagctgctcgggaggctgaggcaggagaattgcttgaacctggaaggcagaggttgcagtgagctgagattgtgccacctgcactccagcctgtgtgacagagtgaaactctatctaaaaaaaaaaaaaaagcttcaaaataataataccaacaagcttactaataataaaaatattaaacaaggctttacatttatttgcagcttttttgtccttagaatatatccttgccaggtgcagtgactcacacctgtaattccagcactttgggagggatctcttgagcccaggagttcgagaccagcctgggcaacatagcaagaccccgtctctacaaataataataaaaaaattatcttggcttggtggcacatgcctactactgccagttactccagaggctgaggtgggaggatcacttgagcctgggagatcaagactgcagtgagctgggtcatgccactgcactctatcttgggtgacagagcaagaccctgtctcaaaaaaaaaaaaagaatatgtctcactaggtatatatatgtaaaaaatagagccatgcaaaaaactagaaaaaaacagggattaaatccctttatgctggagataatcctttttaaccatgactcaagatcatgaaaattttggaaaatttcattacataaaaaatgaaagcgttttgccaggtaaattgagtcacaacttctcagttctgctgctgtagtgcaaaagcagtcatagcatatatgtaaatgagagagcatggctgtgttccaatgaaactttattagtggatactgaaatttgaatttcatataatcttcacatggcacaaaatattattcatcttttgattttaaaaaatgatttaggctgaacacaatggctcacacctgtaatcccagcactttgagaaggtgagggcaggaggattacttgaggccacgagttcaagaccagcttgggcaacacaatgagaccctatctctaaaataaataaataaataaataaataaaataataaaattttaaaatacaaaactaaaaatataacaacccctcagcttttgagccatacaaaaccagtcagtgggccagatttagcccccaggttgtaatttgctgaccttttgtctaaatggtatctattaggtctcttccaggtctaaaacaaaagtgatacacttttccttttaatatcttctgacatacagacctacactaattttttttttttttgagacgaaatctcactctggttccccagtcaggagtgcaatggcacaatctcagctcactgcaacctccgcctcccggcagcgattctcctgcctcagcctcccgagtagctgggattacaggtgcgtaccaccatgcccagctaattttttgtattttaagtagagatggggtttcaccatgttggccaggctggtctcgaactcctgacctcaggtgatctacccacctcggcctcccaaagtgctggaattacaggcgtgagccaccacacctggcccacctacactcaaatttataatttcttttgacttgttttagtgtctttcctatagggtaaacaactaattagaagctttagaatagtaattcttttggaattaggcacagatatccctctgggataaagtaagagatatgtgcagaactcttgttttatgtgtggttatgaaatttttattttcagttgaaacaggctttctaagatcatggttgtctatcagtgacaccagaatcacctggggtgcttggttaaaagtgcagattcctagatccttcctcagatcttctgaatcagaacctctaggaatgcatttaaaacaagttccataagaggttattattgcacactaaagtttcaagaccaaattaaaaagaaaacaaattaagagaggtttagtactagtgaaaacttccagtagtatgcaggaagcagtttcattaaatttaataaataccttaaggaacatttctgctcaccatctgttcttgcagtgcaataaattagactgtatttagatctatttccactaaaaatacttacaatctgtgaactgattttgtctgtaaacaaatatattgacaaacacttcctcttgttacagatatgtaaatctcaatgggtatgtaaaactctagacatttattaatgtctataataagatagtaataagcacactaggacattgggttccatgacacaggagaattaggttgtttcactgatatttcttgaactgggagtttgacttcttagggtcatttgaggcttggtaaaagttttagttaaaggttgctctattggagcaggaatttcatgaaataatcaaagttgctttgtttacctggattgttagaattggggcttcatctttttctggcagaaatccaagatctgtatgtcaacagatgacagtgtcaggcatttgtagaatattcagaaatcctaaggatgttttacaacagtgtgttctgctcctaatccctatcgacttaaagcttatatacccagcaatattagtaaaaacagtcctgctttgaaattctcagaactataccattgtttgtgttaccttcaatccattgcaaagccttagaaaagtccattcactttaggaatgaaattttcctgaattatagccaagaaaaaaagtcaaaagaaaatgtatttgttttaatgagactctatcttcttgtggtaatgtttaagtgttcatttgcttcagcttgatccaaaaagcttttgtctgcctactttctacgacaaaagggattcatctctgttaggtctctaaaaacaacagatagagaagacactgcttacttatttggaacaatttttatagtggtagccactatatctgaaaaatacagtatcactgctgtttgtaggttttatatgtgcaatgtaatttactacttttcattggggctcttgaaagacatagatatagaattaaagtggactttaattcttacgtgcaattttggacaactgtaaagtaggttaagtttgtatcattcacttttcttcatattttcttttcttttagtatgctttgtaaaaagtatcttttccctctgactcttgatttctccagtgtttgggattgcatatttgaaggtcattaccaccttattatgaattgataatgaaaaatatttgctcctaaaataggattacaaactttcaatagcctaattatgatggtggttacacatactcatatatgttaaaattcataaaactatgtgccaaagaaggtaaattttactgtatgatattttttaaaatataaaacttttaagcagtaaaaaaagaaaactgttaatgttagaatttcagactattctactttactacaaatttcctctcttttctcaactagtcttgaaccataataacctagaatgagttcaaatgaaccggaaagtagatctaagagaccccaaacagaagcttgtatcttttcctgtataatgcatacccagttctgccttggtagtgatctctgataattgcatattcactatggggtctgtgttgcagtttgagatatcttttgggcatttttcctgtgactcctctttattagctttatgcattaatgatggaacatttaatccataaagagagagaaacacaaagaggtatttcaaagaattactttctctaccacagctacatacaagagaagaccaagttagtataaatattcaagccttaaggatacacaaaccaagtaaaatttcaagaagcgagggacacaggcctttattttattaatttcttgcatattaagtcgtgtagtgttcaaagaatttatgtaaactatgtgacaaaaatctattgtgtgtgtttctattggaatgtgttatttgcagagttctgaaatctgcttcaaagtactttttgtattttttttaaaaaaagcttcaaaatatcttactcatccttacaagatgccagcagtaggatttggcaagacagagggaatgtttcatccttgatatgggtcttcctgagttgccaggagacagtggcttcctagacagctgtctgctcatattctacaccagctgccacccatttactgagccatgtgcttatattatgctaggaaaacccacaggtgcttctgcacaggtgatattagtaatattaatcatcttgttgatttatactgaatatcaaattttgtcaagccagtaaaacagattatgagtgatgtgagtgaatggacaaggaaaatatttttgtagtattcaaatgactgttacatccaatggaattgtggtaggactttatccaaacaggttctactcttgttcaacctgaagcataatgataatttatgtacactgactagtttcatgtccatctctaaaccttactctgttgagtatgtatatatcccattattaaatacttaagaaattcaaccacttatggactgcaagatcatggtctccctggatgacatccttgtattctacaccctaccctgcaacttgatattaaatgagtctctggtttgcttcaatgatatagaatgttcctaatgttagagactgaggtagagtccctgagtcaacttctctccagctagggctgggtatctggtaaaatgcctgacaaggtgtggttgtcctgaagtagaaactcctaagactattgagaatgtccagaaatttttaggattttccgtataattccattgattcatttaaaagtatccagtgacagcctcaaaagaagataatttgtctgttcatagagtaggttgtggccttctaatggctgaagaccttatatgcaattgctttggtttttacatcctctgtgctaactcagtctttcaccatcgaaacatgcttcccagcttccctggggcaggggggatggggggagtggggagtatgcttactctgttggcctctgccctgctcttgcttttccaaaaaggtggctcaattggaactcaactcacctcatttagaaataggaaatcctggctgggcacggtggctcacgcctgtaatctcagcactttgggaggccgaggtgggtggatcacgaggtcaggagttcaagaccagcctggccaacatcgtgaaaccctgtctctactaaaaatacaaaatttagccaggtgtggtggcacacacctgtagtcccagctactcgagagtgggagaattgcttgaacatgggaggcggaggttgcagtgagctgagaccacaccattgcactccagcctgagtgagagagtgagattccatttcaaaaaaaaaaggaaatcctcaccattgaggccagctgtaaagcttggaggcattctatctgagctacccagcatatagtcacaatgaccactaagccctgatttagtccatcctggccagataggctgcattatttatgcataacagttttactaccatacatattaactaatcaaaaccaccagccaagtgtcctctttgggaatccagagtgccagctttctctgtctaaaacatccctccctttgtttctttagctggctaagttctccttgtccttcagtagtcagctatagcaccacttttgtcacagttggtctggattaagtactttttctatatatttcttacatttctgaaacacctgtaggctcatgtcagcccccttagcacactgtaatgtaattgttatttaccttcccataatccctttgaagacaagggctatcttctattatacctatatttgaaactgagcacaatgcctggcatgagctggggctcaataaatgttagatgaattaattaataacttaaacttactagccggccacggtggctcatgcctgtaatcccaccactttaggaggctgaggcaggtggatcacccgaggtcaggagttcgagagcagcctgaccaacatggtgaaacccccatctctactaaaaatacaaaattagctgggcatggtggtgcatgcctgtaatcccaactactcaggaggctgaggcaggagaattgcttgaccccgggaggcggaggttgcagtgagctgagatcaggccattgcactccagcctgggcaacaacagtgaaactccgtctcaaaaacaaacaaacaaaacttaaacttactgaggaacctttactcagtcaattagtatttattgcataactactgagttctcagtggtgagctataccttatagggaaaaaatacaaaatttgatttttgtcatgaagaacttatacagtctatttgaggaaatataactaaaacagccagttttatcaaaagcagttgtccgtatacactctccccacttcccacacattttttaacctgttacttctggcttttgtgccaggctttctctaataaatggcacttgccaaaaccacaatgttttccatgcttctaggcccagtagaaagtttgccatttttatcttacttgacctcttagcattatttccatcttgaaatactttttccctcctcttccatgatatcatacttgtctaactttccttctgtttctctatttagtccttctcagtgtccttttctggctcattctctgctacttgatcttcaaatattaaagttctttaacctgtcactctatattccatccctgagtgctcacattccaacatgacttaagttaccatctatacattcatgacttttagatttatatctttggttcaaacaccttctttgagctctatcccagtacatccaactatttattcaatatctgtacttgtatgtttcataagcacctcagtttcaagaagtcattgtcctcaagccaaaaactagcaaatcaacctggacaccttctgatgatctctcactgttcatttctagtcagtcattaagtcctggtgatttcaccttcttttcttaaatttgttcatttctgaccatcccccactgctttcatcctagtctgagctaccattatctcttgcctccactattgcaatagtttcctaattggtatgtttacatccagttgccttcttccaatctattcttcatccataactaaagtgatttttttaaaggctaatattaccatgttgttccccaatgtgaaccctttcagtggtacccttttaccctcagaataaagaacaaaattcttaactaagcctatgagaccttctttggatgaccttgtccttgcctgcttttccaagcttggctcctgcctctctccccacactatactccaggcacagaggatttctttcgttcttaaacatactgtgcttctccctacctcagggtcttcacatatgccattccctctgcctatactactttcttcctctttacttaatcctacccatcctttagagttcaggctcagacaccatttcatcatgaaattgggttgggatcttcccttatgtgctctcatagcatcctgtgtttctccttcattgcacttatcacagttgtgatggtggtttcctctgctacaatataagcaggaactatgtctgtcatagtcaccactgaatcctcagcatctaacactgtgtcttatgagtaatgctcaataaatgtttgttaattaacctattccagtctgccttaatgatgaaagttttcttctgtttttattttatttttgctttttggtttttagatacataagattattatgagatatgtcttaaagctcaataactatgggagagtcacctcattttcacacatcccttaatttagagtaattgaatttttaactttgaaatatctggaattaatcatcactatttaatgaggatgctatgataaatgttctttatcattttataaaattctgaagaggcctaattattcatctgcttaaatattattgattaattacttagatttttcttaaatcattaaattatatcagcatcctcatttatgtagtaagatataaattgaataagcaaagagaaaataagtaagtataagaagtaagtaggcatatatttcatatatggatttttaataggaatactcatcatgggactaatatggacatactccaggaatggcaagaaattcagtttagcggctgggcacggtggctcatgcctgtaatcccagcactctgggaggccgaggcggatggatcacaaggtcaggagatcgacgccatcctggctaacatagtgaaaccccatctctactaaaaatacaaaaaattagccgggaggctgaggcagaagaatcgcttgaacctgggaggtggaggttgcagtgagccaagcaccactgcattccagcctaggtgacagagcaagactgtctcaaaaaaaaaagaaagaaagaaattcagtttagctttgtgaaactaagaccaccagagcttaaaaacaccttcaaacaaacaaacactgagtttattaacttgccaggcaaaggaatatacaccagtgaagacttcactgaatggtatgtggaagggggaaattcaggggcttttaattgttttataatagctatacttataagaactaaaaacttatcacattgtataggacagagtgagtccatagatctgtacatgattgattaaaacaagtcccagtttttagtggtcaagaaagggtcttcagttacgtatagcaatgatctggtatactgaggtcactcaaagttcatggtcaattatccacttaagctgattagaaccaattttgatgtaatacaactttcacttttgatataatctaggcaaatgtttctgtaaatagaagattttccttatacagcttgaattgatggatagaatttggattgtcacaactaggtggggaagcatttttacttctactctttaatcagatttatattatgcttttctttaaaaggtctcgaaacactcattcatataggaaaactcttttcttagttagcttttgctgcataacaaaatactccaaaacttcatggcttaaagcaatagaatttatttgctcatgattttgtagattggtaactttgagctgggctcatggcccatctctgttccacatggtatcaattagactcactcatgagatgcagtaagatgaaacctttcaatgatatccctttactttcagaataacaaccaaaagtgatgacctcaatcacttttgtagtggttggcagtctctttgcaaaagcaatggaagtaactggatcatcatccagcaggcgagcccatgctcatttccatgatggtattgtagtggaagggctcccaagttcaataaaagagggcaagccccagtgttcaagtacttttcaactttctgcttacattctgttttctaatggcccattggccaaagcatgtcacatggccagaagcagacaaggagtacaggaacagactccacttcttcatgggaggagctgcaaagttatgttgcattcatagagacatgcatataggaatgggaagaatttatgactatttttgcaatttttccataatgtagtttttcttcccttccagtccccttacacttagaatgaatctgcttataggttatgtctaccctgtactgcccaaattaagagttttggatgctttagaattctctggattaatgtaaagtaaacatcttcatgagataatgcaggctacagaagacaaattttattaattccctgaatgggtgacacaatcaatttaaaatccatttggattatattttgagtctcatgtacagtggcccagaagcacaaaagtagattttgtttctagatatggacatcaataaatgggaggaaatgatgtctgaggtgagacctaaagcatgtggaggatctagtcaggcaaagagagggagaaaaatatttcaagcagatgggaaaatgacagaaaaccaattttgtgtattcatttttgtgtcacatgagaatctggagacacttagtacttaccctaaaattcgtttacttatctgttctgccattggaccctaagctttataatggcagaatccatagtaggtgccgaataaatatttatataatgaatgagtgagtgagtggtttagtgagtgagtgtatgaatgaataatgcaaaagagctgggtgaaaaacacagatacagaagacagagccacagaggaatgaaaacagaaattgagaagaatcctagctagagatgagggggaaaggaaaaagcagcagaggatgaaacagataaatagcagaaggggagacaagcagaagaagcagaagaagacaagcagacaagctctcagaactttggtagctgaccggtagagctgactggtagagatttggttggttagcaattgcatcagagaaacttagcactcctttaaaatactcattaaggccaggcgtggtggcttacacctgtaatcccagcactttgggaggccgaggtgagcggatcacgaggtcaggagattgagaccagcctggccaacttggtgaaactctgtctctactaaaaatataaaaaattagccagactggtagtgggcacctgtaatcccagctacttgggaggctgaggcaggagaattgcttgaaactggaaggcagaggttgcagtgagccaagattgtgccactgcactccagcctgggcaacaagagcgaaactccatctcaaaacaataaataaataaataaaaataaaatacttattaatcttccagcagttcagacccagccccttctgtactattaaactgcttgtctgcttttattttcaaacttcaaagttcatttttgaacacttgtttttctagagaattttgaaggccttatataggcataaggtaatgacttagattttagtagtttctttggttcatcagatgtatccaatttaccagttcccactgaaaatctttttgcattttaaaatatgtcagattgtcttagtctttcttctttgaaagatgaagacttgcctccaacattgttgggaaaaaattgtacttgaaaccagcgactatttttattattctgagccattctatttgatttcaatcaaaaccagtttggggtttttggagtcctaataggagtgatgcacataggtacaattaaaagcacagtttttcccccattctcaacctgggtgatgcagttctggctgcaagggtaactcttatgctcagcacttcagcagtggctggcaaagcatgagactttggctagataaaggcaattagctgagatatacccctagacagatttctcagaagtttgatccaaggcatcagaatgacctgagatgcttgttataaatgcatcttctaggcttccaccctagacatgaatgctgagaccagctcagtcatggagaccctaacccagtggcactagaggaattaaagacacacacacagaaataaagtgtggagtgggaaataagggctgacagccttcagagccgagagcctggaacagagttttacccacatatttactgacagcaagccagtgataagcattgtttctatggattgtaggttaactaaaatgggaaacaaagggatgggctgaaacaaagggatggactctggctagttatctgcagcaggaacatgtccttaaggcacagatcgcttatgctattgtttgtggcttaggaacgccttaggtggttttccaccctgagtgagccaggtgttccttgccctctttccggtaaactcacaaccttcagcatggggatcatggccatcaggaacatgtcacagtgctgcagagattttgtttatggccagttttggggtcagtttatggccagatttggggtcctgttcccaacatgttccccatttttgtttttgcaagacgataaaagcaaaggcggctttatcacagtgagctacttctttcagtagtcaggatctgcatctacagactatacaaagacaaacaatacagattaaaagcacaatcatcattgaaatcacagagcttccaagtgtttttatccagtctaatgggttaatagctgctaatccatctgtagctccttcaagcgctccagttcctggcattaaggtcaggtgtgtctgggatactttaaatatttgttcttttaattttgcaatatccaaagacaagtttgtagagtgtccttctagacgttttttattctttcccaaattttgatcttattaagagccatgaatagtttccacaagtccttatgtttagctcctacagcgggccatatcatttgaggttgaggtgccactatatggccatgtttccagataataggaactcttgccatacttcttaccatttctaccatctgaccattttgtttagaccagctgaacatagtgtggccatggcacgcagactgagaggtgaaattcaaggtaaacatccccttaggggaccaatcaataatgattccataggaatcgttgtgcagcacctctctgcctgttctgcagtgcaatcttcccaaacaagtacattcattatttctggccaggtccaattctgcttacaaataggtttttgagggtggtatgcctcaattataggagtatattcatttttttttttttttttttttttttttttgagacggagtctcgctgtcgcccaggctggagtgcagtggcgcaatctcggctcactgcaggctccgccccctggggttcacgccattctcctgcctcagcctcccgagcagctgggactataggcacccgccacctcgcccggctaattttttgtatttttagtagagacagggtttcaccgtgttagccaggatggtctcgatctcctgacctcgtgatccgcccgcctcggcctcccaaagtgctgggattacaggcgtgagccaccgcgcccggccgagtatattcattttgataaatactgagaccagaaagcatgtgtaactgtgccatagagtgattacgtccaggcattattgccagccaagattgataaatatgcccaataagtataattgttctctgtgtcagcccttgttgaaggaatactcatggcagtggtgatcaccactatcatagctatcattaaattactcattgtgactgattatcccactttcctcaggttttcttccaccatctgtgacaccttcttgatctgtccccaggtaggtggctgtgttcgacaggtgttgcttgtgacagttggagtcttcctcagcgtcagtcttgatatgtctgcaaccggtgggtctttgggatcttcccaaaacctcttcctgggtatctggatcttagtaaggctttagatgtctcgatcgcacccaaattggctgttgattcaatcctggagaaatacaagcataacctctaccccaagttattattttacctatttcccaactttttattatcagatctctccaccaaaccagttgttctgcttctgtctttgcagctggtttctgtagatgctgttcagctgctgatagtatttggtctttaggcaggctaaaaaaatttacagtcaataatgctagattcagttgcatatgtggtgtcccataatccctgttttcccccctctgcttttgcaattggtgtttcagggagagattcattctttccactatggcttgtccttgagaattatatggggtatcagtaatgtgtttaatattccatatagagaaaaatgtaactagagcttgtctagtatatactggggcattgtctgttttaatagaaactggaatgcccataccacaaagcactgcaaaaggtgatgtttaacacgggcagaagactctcctgttggcatgtagcccagatgaagtgagaaaaggtgtccacacatacatgtacataagctagtctcccaaacgagggaacatgtgtgacatccatttgccaaagagaattaggttccaatcctcgaggattaactcctcctgtgaaagatgaggaatgcaccatttggcaagttgggcatcgctggataatggctttagcttctttccaggtaatgcaagtatctgtgtttgagaccaaaggctcaatttaacatgggttaaattgtgaaagtgtctagcattaggtattgcagtagcaactaggtgatcagccatttgattcccttcagttaaaggtcctggaagaggtgtatgagccctaatgtgagtgatgtaaaaagggtgcattctactcctaactgctgtttgcaattgggtaaataaaatcatcagttgttcatctgtatgaaatcataactgagcattttcaattaattgtgtggaatgaaccatgtatgaagaatcagaagtcaaatgaataggcatattaaaagcagtcaatacctcagttacagctacaagctccactttttgagctgaagtatagggtgtctggaaaactttacccttcgagccagaataagaagctttaccattagtagacccatctgtaaaaacattctcagcaccttcaattggtttaaatttagttattttagggagaatccaattagttaatttcaaaaattgaaacagttttgtttttaggaaaatgattatcgagaatactcacaaagtcagttaaatgggttttccaagtaagactatttataaaagcttgctgtatttgtgcctttgtgagagtgacaataatttttccaggatcatatccatgtaatttaactatctgagttctcccatttcctatcatagtagcaatttgatccaaaaaaggagttagagtccatgaattagtatgtggaagaaaaagtcactctacaagatcttgctcttgaacaataacaccagtaggtgaatgctgagttgaaaaaaattagcaaatctagagtcttctctggatctattctatttatttgagtcttatgcacttgcttttcaatcagctgcaactctgcctcagcctcctttgttaattgccgagggttagtgagactagaatctcctctaaggatagaaaatagattacgtatggcataggtaggaatgcctagagcaggtcgtatccaattaatgtcccctagtaatttttgaaagtcatttaatgttttcaattgatccctacatatggttactttctgtggcactattgtagggtcatttactaaggtccccaagtaggaataagtctgaattttgtcaggagctataattaaactggcgtgagaaatcgagttttgcaagtgatcataacattggaataatatttcttgagtgggggcaagcacaaagtatatcatccatataatgaataatgtaacactgtgaaaattttttacgagtaggttcaattgcttgacctacatacgtctggcaaattgttggactgtttaacatgccttgtggcaacactttccaatgaaaacacttagcaggccgcaggttgtttaccacaggaattgtaaatggaaactgttcacagtctagctcagctaagggaatagtaaagacacagtcttttaagtctatgactattaaaggccaattttttggaatcatagcaggagaagacagtcctggctgccatgtccccataggttgtataactgaattaatggctcttaagtcagttaacattctctatttacctgattttttcttaattatgaaaactggagaattccaaggggaaaatcttggagctatgtgtcctttttctaattgttcagtaactaagtcctccaaagcctccagtttctctttacttagtggccattgttctatccaaattggcttatctgttaaccattttaaaggtataggttctggaggcttaacaatggctgccataaaaaatgatatcctaaaccttggcgggaactttgtctttctgcttgaagcagttcctacaaaccttgcgaattttttcctagtcctacaccagggacacacccgatttcatgcatcatatgttgactttgaggactatatcattgctctggaattagaacttgtgctccccattgtggtaataaatctctccccccacaatttataggtacagaagttataattggttgaagagtctcaagttgtccattgggcccttcgcaatgcaaaatataactactttgatatacttcaggggctttaccaactccaactatgttaaattgagcgggttgaattggccatgcagatggccagtgctgtagataaatgattgaaatgtctgctcctgtatctaacaaacctttaaatttctttctctgaatagttataggatgtttatcagtaatttgattgaccctataagctgctttgccttgtttatttgtgcttccaaatcctcctgttcatttaatttcatttttccccatttccacatatggcacaatcaggagctgtgctatatgctctcctggctctgctttccagggaacaaaagtagatataacaatttgaatttccccattgtaatctgaatcaatgactcctgtatgtacttgcactccttttaaatttaaactagatctacctagaagtaatcctgtcatccccactggcaacaaatgactggagacagcaacattctttaacagtctcattacaaaaagagaacctggtccatattgattaatagcttgtttaaattctttgagtaatttaaaaggaaaaggctcaaatgtagctataatatttccctgttgatctggtgggtgtatcctaacagagaactgccaggcctctaaatcaccctctcttgtagcttgctgaattcctgcctgaatagaactgagagcagtcgctcgaggtgctgctcgaacagtcactggggcaactacttttcgcccagtgtcctccagaaaagaaagatctggagggtcaggccactctttttcttcaaaataatgagggggtgcagaagggtagggacaaacctctccctcctttgccactttagatttagctggcaaacaaacctgctctgtcacctcttcggttacttcatcatactttccttcctcctcattatcagtgtgaaaaggttccaaggtggaatgaaccagggcccaaacttgtcccattgttaccctgatgcttccgagctccccttcttactcaccacggggactgcttaagagtactcgggtgtcctccagcttagttccacattctccgactgtcactccagtgacccttcgacccaggttccagccccatgtatgggcgccatttgctgagaccagctcggtcatggagaccctaacccagtggcactagaggaattaaagacacacacacagaaatatagagtgtggagtgggaaatcagggggctgacagccttcagagctgagagcctcgaacagagttttacccacatatttattgacagcaagccagtgataaacattgtttctatagattatagattaactaaaatgggaaacaaagggatgggctgaaacaaagggatgggctccctggctagttatctgcagcaggaacatgtccttaaggcacagatcgctcatgctattgtttgtggcttaggaatgccttaagcggttttctgcccagggtgggccaggtttccttgccctcagtccagtaaacccacaaccttcagcatgagcatcatggccatcacgaacatgtcacagtgctgcagagattttgtttatggccagttttggggtcagtttatggccagatttggggggcctgttcccaacacctgaaatcaatcccttcagatgatttctctgtccagggaagagagaagctcactaccctaaggccttattgcattcaaccttgccttttcagtatatatagcagcttctagagctatttttactacctgttttttaagttgtaaatcaatatcttataattatatacatttgcagggtcaaagtgatgttataatttgtgaatacaatgtgaaataatgaaatcaaacaaattagcatatctatcacctcaaatacatatcatttttttgtggtgagaacatttgaaatttactctcagcaattttgaaatgtacactaaaacttattcatcttgtctaaatgagattttataccctttgacaatcatatctccatttcccccattcccagcctctgtaaccaccattctactctctgcttctatgtgcttgtttgttttatattgcacaaataagtgaaaacttgtggtatttgtctttctgtgcctggcttttttcacttagcataatgttctccaattccattcacgctgtcagaaatgacagaatttctttctttttaaaggctgtatagtattccattgtatttatttattacttattttttgagacagagtttcactctgtcacccaggctggagtgcagtggcgtgatcttggctcactgcaagctccacctcctgggttcacaccattctcctgcctcagccttacgagtagctgggactacaggcgcatgccaccacacccggctaatttttgtatttttagtagagacagggttttgccgtgttagccaagatggtcttgatcttctgacctcgtgatccgcctgccttggcctcccaaagtgctgggattacaggcatgagccactgtgcctggcccctccattgtattataaaccacatttcttctatccatttgtctgttggaggacacttaggttggttctatcacttggctattatgaatagtgtcacagtgaacatggaagtgcagccatctctttgacaaactgatttcagatcttttgggtaaatatccagaagtgagactgctggatcatgtagtaattctgtttttagttttttgaggaacctccctaccattttccacaatggttgtactaattcacattcctaccaatacttcttaagtctagtatttagttgggtaaaataaggcctacctctataaaaagtcaaatagtagaaagcactctgtgattaatgccaaattcaataagtgcttgtggaagaagggctcactacaggcctgaatcaaagattttatggagaaaagacaggcaaacattttcaaagagagtctgaattcctgtgttccaatctggaccaaatccaagggtattaactcaacatgttttctatatctacatcctgcagagtatccaagatgaaggagaatgttaaacagaatagaaaacaaagagaaagcatagacaaaatcatagtcaaggtggccaacacacggaaacaggctctgcaggagcaattcgatgaatggattctagaccctaaaggaatgattcctaagtcagtggtaagaaaattgggggtatatgtgaaaggtaggtggggtaagtggtaaaagggcaattgctagaatactgagtagcatactagaagcctcccttgaaattttcagtattgctgaggtaagtcttgacctgtctggtccgtgagtgttgattccttcaatttcttttgagcattaccaaaaaaaaaaaaaaattctagctagatttctaaaatcttgactctggctgaggttcccaaactcatcactataaaccaacatatatttcatttgtttgtttgttgtgtgtgtgtttgtatgtgtgactacttctgtgagacctgcaagactatctcttagctctagagaacaactgtactctgagagttaaatgctttctcttaagtgtatgtggatttggaaatactttttcattagatacaatgctaagcatattttcagtttaaagtgaatgattaaaaatagatcaaggaagacaagccacagactgggagaaaatattagcagaagacatatctggttgggtgtggtggctcacacctataatcccagcacttttggaggccgaggtgggaggattgcttgaggccaggaattcgagaccagcctaggcaatatagggagaccctacttttatgaagaatttagaaattatccaggctgtggttccagcttcttgggtggctgaggtgggaggattgcttgagtccaggaggtcgaagctgcactgagccatgatcatgccactgcactccagcctggggaacagagagggactacgtctcttaaaaacaaaacaacaacaacaacaacaaatatatatatatatatatatatatatatatatatatatatatatgtgatatatatatcacacgtgcacacacacgcggtgggggagctctttgtactttccgctcaattttcctgtgcacttaaaacttctctaaaaaataaaatgtttttaaaaatggactaagaagaacttggatatttcatttttagtaattgaagaatgagaaagtatagaggattctttggatggccaaagtgcttgccaaaagtgccttagctccatcatgccgtgtctgagagttgctagaagtgtcccctggagagggcaaaatggggtcactgtcagcatcccaatcctaatcacacaaaaaggttgggaatcattgagaatatatgtgtaaaataactttatatacccttaagtattctaagaggagacttcaaaaagtgtgtggaaaaattgaattaaaagataataaaaatataaactttatatctcaacataagctctatcaggctgggcgccatggctcaggcctgtaatcccagcactttgggaggctgaggcagaaggatcgcttgtgcccacgagtgcaagaccagcctggccaacatggtggaaccctgtctcaaatactatcttggtgcagaagtaattgtggtttttgccattactttttaaatggcaaataaataaaaagaggctccatcaagtttaagacacttgtaagtgatgataccagccatttagtccatccctaaagaactgagggtcctgggaatttaaccatttcaatgcagtattttttgcattattaactgacgaaaaacaggtgtcctttaatgatttttttaagattagaaaataaaaagtcagaaggagttaaatcagtactgtaaggtggatgcctgatgatttctcattgaaactctcacaaaattgttcttgttttgttagtggagatgggtgttgctattttgtccaggctggcacaaactcatagttcttctaccttagcctcctgagtagctgggactacaggtgtgtgccactgtgcccagcttgcccttgtttgatgagaagaatgagcaagagcattgttatggtggagaaggactctctggtgaagctttcccagatgtttttttgctaaagctttagctagtgtttctcagaacactcttatagtaaacagatgttattgttctttggtcttccagaaagttaacaagcaaaatgccttgagcatcccaaaaactgttgccatgacctttgctcttgatcagtctgcttttgctttgacaggaccaattccacatcttggtaaccaaccattgctttgattgtgctttgtcttcaggatcatactggtaaagccatgtttcctctcctggtacaattcttggaagaaatgcttcgggatcttcatcccactgtttaaaatttccatttgaagctctgttcttgtctgcgtctgatctgggtgcaatggttttggcacccattgactggaaattttttcaactttaatttttcagtcagaattgtgtaagcagagccaactgagatgtctatgtgttggctattgcttctgctgttaatttttagtcctgttcaataagggcatgagcaagatgatttttttcttgcaaattggtgtggatagtctgcaccatgggctttatcttcaacatcatttcatcctttcttaaaatgaattatccatttgtaaactgctgatttctttggagcattgtccccataaacacttcataaaacaccagtgatttcaccattcttcccgccaagcttcaccataaatttaatgtttttgcttcaattttagcagaattcatgttgctctaataggggctcttttcaaactgatgtcttatcctttttagttcttcaagctagatcttgttcagacataacaagttaacgacaagtttattttggtgcaaaaaaaattgaaatccatgcattttttttcataatacacattttccatgaactttttgaagacccccttgtagaaagtatatgtgacttattactatttctgtccttgggttggaaagatcacccaatactaaaacagaaagactatagatggcttttagtctaaaataacaaatatgtggtaactgaggagtggcatatggtttctttctttttttcctcttttgagttgcagattcagaatgttcttcaagaattctttcaaaatccagatttcaagcttggtaagtctgcctattactctgatatttttatttttatttcttttttgggtgggggacactgaattcagatgaagagtcaacatgagacagatgttattcaaaactcttgcaggggcaattaggctcttccatgctgtccagatacagaatgtatacaagcagaaaagcaatctgtgattctcaatccttttagtctggtgtccattttattaccagtactctgcaatactcttttattatcctatgacattcctagaaaatatttcttacatacatagaattttaaaagaaagatatgatgtcataactgtgatgtaaacgagaaataaaagtaaaggcataagaaaactatatgcactggctaggcatggtggctcacgctaatatttaccagagttgaacactgcctccgtaaattccttagtttgaatttccttgactctacccagtcttatatcctacaccttcactataaccctcctggggtcattctctgtttctcaaatgttgtttcttgagttcccttttcatgttacataaatttccctggataatctcatccagttctgttactatatatactaggattaagacttcttcagaggccgggcacagtggctcacgcctgtaatcccagcactttgggagcccgagatgggcggatcatttgaggtcaggagtttgagaccagcctggccaacatagtgaaagactgtctctactaaaatacaaaaattagccgggcatggtggcgggcgtccgtaatctcagttacttgggaggctgaggcaggagaatcacttgaacccaggaggcggaggttgcagtgagccgaggtgacgccactgcactccagcctgggtgacagagtgagactccttctaaaaaaaaaaaaaaagaaagaaagaaaattatatgcactgtatttcaatatataaatgctttgttacgacttcgctagaagacgtaatagagtagtcagacatttctacctacttataatgtacctttagatataagagaagtaaaattatatacagttgaccattttatttgtttttgacattttggaatagggcaaaatgaatatatatatatatatagaattcccagaaatgcagactgacacaggtgtgttgtattagaattcagatacaatttatattactccctattacataagtcctgaaatggtgaacaactcttggtaaagttccagaattaaacaaagtataattctccctcaaattttcatataagttatattcttggaaaattccacagcaaaattatattctgcatttatatgtaaaatagagttgggttctaagttcaaaattattataatcaggtttttcatctacttgaatgtcctgcagaagggggaaagtctatgtgcaagaattccatgtgttctgcctctgctcctattcctcatcactgtggcaataaaaattcacccaaaaatttccaccatgctccctgggaggaaaggaggacagcaccacccctatggagagtcacagattttggtgcttttgttttcagaaagatttccctatatgaaattaggtggaaaaaaaaaaaaaacctcacttgtcccataggaactagagtttgggtcctgagatttacataattaatatccagtagatttttttccaattgattatttgactacttttgttacattgacaacaatacattgtctgaagtctgttgtcacttttaaaaataaaatatgcttcccgtcttcctgatcactgatctccaagcatgatttgggccttactgataaccttttgtccttctacctgttctcacattttccaaaaaccgtaattcttcagtcagctcatcttttactcttgtttcaaaaaatcattgaaatagcttcctttatttttgaatgagggtacagaaggagtgagttaagagaactcaatttgggatcctgataaaattacagaaattccagagcattccaactgacagtgattgtttctcctctcacctcctatactacagtatttatttctgtactattcattcggtcaatattcattgagccctcacttagttccagatactgtaatgagtaagagaatgcaaagaggactgacaagacatgtttcctacccttaagttgctcaaactccagtcagagacagacagacaggtatacttaatagcaactgttactgctagaaacgtctggtttgcataatcatctggagcttgggggaaggtctgggatggaaatgtctgcatctaatgcataagtttatatgaaaatttatatagccttcctatggccacaataacagatatctcataattagcacttaccaaattcaagagtgattgaaaaatcttttctatgcccttgtgccaacccatgacaggcaggaagagttactattagaagtaggagaggaagccagtgtatagttctttcatcatgagctttcatacaatttatgtatttttctcttgtaaggtcaataaggattacataaattgtcatatcaaatgaaggtttaaaaatctgtatttgaactaacggtcacattcatcattactgatcactctaatttatgaaactcttttttcttggtttttgtgatatcattctcttgatttttttcttctatttttggtcaccttttagtgtttttgtttcttgactcttcttttgcttgcaccttaaattttgttttccagagtttccttttaggctttcttgtcactatacacactatacacattctgtgggttttcttattcaagtccatgactgcagctgatgactcccaatctatatacacattacgaactttccctgagccccaggtcctatttgaaaaaaagctactatgagtggtaaatgaaaaagcaagttgcacatcaaaatgatcatatttataagtagaaaaaaggtacatgtgtatatatatatacatttgtatacatacagaaatgcatagaaaggttgctggaaggatgataaactgttgacagtggttacatctggggcagaaaggagtgagagtgctgatgggaggtagagaaaaaggaagatattcatgttttgttgcttatatttttgtattatttgaatttgttaactaaaagaacatttttatgcattatttaatttaagaaacattaaagacaaaataaagtttttaaaaagaaagcttgcagaagtgttttgtttaaggacctgctagcataaaccaacacagatgtttttgtagccttttatactattgatgtgcatatttatttctgctttatcccaatccagacattaaaaatataggctctttttttttagtatttggtttgcttgctcagccaggaaaagtaataattttgtagtatttggtatgttacccaactatatgtaattcactttattgtaattatggttagacattagctaataaataattttatgttcttttaaagcactatagtataaatatcaaatatatattacaacctaactaactagcaaataatcttcattccataaataggatcacactgcaaacaactggatattactgactcaacagaaccaagattgaacaaaatggaatttacagaagtaagagttacattatttaatgtttgaattgaattattttgtcagtttcaattgtctgttggtggctgtcacacatcattaaattagtattaaatgaaagcacaaaacttattttatacattctaaaatatgtactttaaaatatttcaactcctctgaaattttacaatttctttcaatcagtatcacgcatgatgtgagagtataaaaatcgtccactgacaccttctggtaagatcaagaaaaaccagcatcttatattcagtgaaatctggttattcaaacaataatgagatctaaaacttacaaaaactttcctatgggccaggtatcatacatgaacttggttaaccctctcagcaaccctttcctctgcttttacagatgaagacaccaagatgcagaaaggttaaataacttgcacactgtttcacaattagtaaaactgggaaaatttgtattcagtcagtttggtttcaaagtctacataatattgcatatgaaaaagtatgattctattgtaatggaataagtgaaataagcaatttaatggtactagagtcctaagtcttccacagcctacttatatattttttcatgtttctccatttccccttgtttttctctgatgagttccagagtcaaggtaactttctgtttctcttttcatacacctttgcacgattgaaggtgaagattatgcactatatacattttcaaagctctgtatgagggatttctggaattcttttaaaaattattgtatagataagaatttggcaaattctacctcagttatgttctaactgtgttttcttagattctgtgtttgtctatttgtcatgcattactcacaaggccaaactaatggccacagttgtttatatctcccctgtgatccagaatccatactatgaaccatctccttactaattctcacacactgagctaatatttctcctgctctaaatcaacccagaaccaggtaccagacaaccagagatagcccttctgcctcagagtctgccagaattattcaaaccagccaatcctcaactgtttaacctctcgtggcttgcatttctggaaactccagtaaggattctggcttaggctgtccctttgctcctttctgttctgcctcctgacccaaacctggtgcttcccctgtggccctgcatggtgtggcatgctttcttcactcggaagtcttaagtaataaaaattttctttcagtggcattagcctctccatgtcatcactcagtcacctccataaattaaaattccacagatacaaatgagacaagctactggaagaaaaatacacagaggaacaaatgatagtattaaaattgttcatgaaaagtcaaagctttatctctttaatacagtaataaacataacttacatttctttgcaagggactgatgttcagtggtacttgcctatttgtcttatattagtttccctaaaagtacgcaagttagaacattttcctatttttttcattataaaagtaggcctgatgtggtggcttatgccaatgactagggaggctgaggcaagaggattgcttaagaccaggagtttgggaccaacctgggcaacatagtgagaccctcatgtctaaaaaccattataaaatatattaattttatgatatgtgaattatgtctccataaaagataatataagttcattataaaaatttaaaggcataaaaatgtaaagaagtaaacaattttaaatccacaatttaccaccaataaaagccacagttaacactatatttttttgtgtaataataatagctaacacttttgactcctttttatgtgccatattgtgtactgaggttattacatgcactttcttgtgtaatcgtcacacaactcagttattattatgttcattttgcaaatgagacctaaaaaggttgaacacttgccttgagatcacacagcacataagtgacagagctagactagacccaggtcagcctgacttcaaagctcatcatagtcttgacccttgtgctttatagtgtctattatattcatagtgagacatgtaagtttttagttttaattttgtggtttttccatatagatttttggttatgcctaatatcctacttttttcacttaatatcatctcttgatcatttctctatgtcaataaatattctttaaaacatgttttaaaatttttttattttgaaataattatatatttacaagaagttgcaaagatagtacagagaggtcccatatgcccttcatccagtttccccaaaggttatattttgcatgactttagtataatatcaaaaccaggaaattaacattgatataatgtgtgtgtatagtattatgttattttagcacatgtagatttctgttaccaccaccaaaattaagatacaaaactatttcagtaccacaaaggtctactgggtctactggtaatgacattttgccagttcaggggaaatgtagaaatcttaccttcctttaagtcattttccactttgccaattaaaacatcattgtctgaaatatttcccatacatccatcacatcaggcactgttacactttgcttccactgttaaacatcatttagaaaactcaagatgagaagaaaagtctgttgtatttacctgtgttttttgcttttttcattgttcttccttcccgatgtttcaagattccttcttttatgcactctatttagagaatttcttctatagccattcttttacagcagatctacagatgagacaacttctattagttttacattgtctgagaatgtctttattttccctttattcctgaatgataatttcactggatatagaattcttgattgaaaattcttctattttagcccttgaaaatgttctctcatttccttctgatctccatggttggtgatgaaaaatccacttcattccaattaattttcctcagtaggtaaagtattgtttttctcttgttggtttgtatttagtgttctgaactctgaagacatgaatgttagatcttttattataatcccacatgttgctgagactctgagattctgttatttcttttttcctcttttttttttgtagcggggggggggtctgatatttcctctgttgttcgggtaaattctactgttctgtgttcaagtccattgattccttcctctgtcttttccacactgatgctaagcccataccttgagctttttatttcagtagtttttgttgttgttgttctttttcagacaggttcttgctctgttacccaggctggagtgcagtggcatgatcgcggctcactgcagcttcaacctcccaggcccaagccatcctcccactttagcctctcaagtagctgggaccacagtcatgcaccaccatataaggctaaattttatttttgtagaaacagggtctccctatgttgcccaggctagtctgaaactcctgagctcaagagatcctctcatttcagcctcccgaagtgctgggattataggcgtgagccactgtgcccagccttgttgtttttttaagaaatgtggttttggggaggggagaaaaagaaaaaaaaaaaaaaagagatgtgatcctcccacctcagcctcctgagttgtatttttcaaaattttcgtttttcttcatgtcttttatttctttgctgagacttttaagtttttaatttattttaagcatgttcataattgcttgttgaattatttttatagtggctgctttaaaatccttctcagataattccaacagctgtgtcatctcagtgttggcatctgctgattaaattttctcattcaagttgagattttcctagttcctcatacaatatgtgatcttctgttttgtcttggacattttggttataatgctattgatgcaggattttttgctccttagttcagctaaaatccaagttcttgtctcacaactagggaaatgaggcatgcagacacattgaagggtgaagatggatttattaggcaaaaagaaaactctccacaaagaaaaagagggtccatccaacaggttctcacttcacagactgaataccaggtcaccacatgggagccgaagaggcctggcttctcccctctcataaggcgtgaattattggtggctctgccccattctcccaatgcacatgtggtcccccaatcatttgcaggcatgcccaggcaagaccctgtgcaaggtttccttagcttctcctgcatctatcactatgagacttgggatcttatttgcatcttcttttaaaaagcttcctctgataccatgctggtggaagaaggggagtgccacctctctactgccaggtgggcataaagatccaatttccccattcaatctccattgacattttggaggcaggggcaaggtgccttgttattgctcagtggaggcgaaattttctgatttctttaaaggttagataacaatttagttttagtttagtgttgtggaacctcagtctgagttactccattttgatttttagtctggtctgttgggcctggttcaggagcttagtccaagacaactgccttctataatttttattcaataaccctcaccagatactaactctgtgggcacttttttttttttttttgagatggagtcttgctctgtcgcccagtctggagtgcagtggtgcaatcttggctcactgcaacctccacctcccaggttcaagcgattctcctgcctcagcctcctgagtagctgggattacaagagagtgccaccactcctggctaatttttttttttttttttttttgtatttttagtagagacaaggtttcaccacgttggccaggctggtctcgaactcctgacctcatgatctgcctacctcggcctcccaaagttgtgggattacaggtgtgagccactgtgcctggcctctgtgggcaccttgatttggactttccagcctctagagctgtaagaaaataaatctctgttgtttaagtcacccagtctatggtattttgttattgcagcctgagctaagacacagtttcagtgttagagtcccagaaatggaacaaatatgttaaagaataaatatttgaggttttagtatatatttgtcaaattgtgttcttggttatactgatttattctcctcagcaatgcatgatggctctcaaggcaccgtcttatcaccaacagtaggtattattgagtataagaaatctcttggtgaggccaagtcaggattgcatgagcccaggagttcaaggctgcagtgagctataatcaagccactgcactccagcctggatgacagagcaagaccttgtctcaaacaaataaaagtaatttgatggcattttgttttttaactcttatctttgagatttctggtgagattaaagattattctatgtaatttaaaaatttcttcttacgtaaattatgcattcagatcctttggccatcttacctgatttttattttttcttatggaattgtaaatgttcattatatattaaagacattatttatgatcacaaattgcatatgtttgtaaactaaaaatataatcctaagccttctgctgactgaacagaccccctcttatccaagggaaccccagaaaaaccttaaaaactgaattccctgccatgacaagaagggaggtcaggcctgcctcattatatctcctcccctttggagtttaggcacagtaagtgacgattgttaatgttaaaatacagatcctaaaactgacaaaacagactctttttggcaataagatactaagttacaaacaagacctaaggccatgtcaggtaagggttaagtcaagcctgtaggccatcagtcttgccacatagcagccttatcttaacttaaaacattcctttctgctgactccaagttttagacagagccttactcctttaaacaattgcaaattaaataatctctgaatccacctataacctgcaaacccctgcttcacgatatcccatcttttggggcctaaccaacgtataccttccgtgtattgacttatgtctttgcgtgtaaattctgcctccctaaaatgtataaaaccaaactgtaatccgactgccttaggaccacttactcaaggcttcttgggtttgtgttttcctcaggctgtggtcacttatattatctcagaataaacttctttaaaatattttatagcgtttggtttttctgttaacatatttttcaacgtttctcaattgttttaaaattttggtggtttctaatttacaaaaaaattttaaaattttatgcaaacaaatttgtagattttttttggagatcttttttattgctcccatgcttagaagattctcttcttcccaaatcagttaaatattcacctagttttttctagctctttttactttttaaaattaacttgaaaattgttttgataagtaatagaaggtgagaatctaacttaattttttccccctaaaatggctagcaaagcatatcactatgtttattaaacaaaccttctttttataggtagctaattttccaaataaaagtttttctacattactattttcttcctttccaatggaaaataaaagtagaacattttacaaaatttgaattactgagattttatcttatttttttgagacagagtctcactctatcacccaggctggggtgcattggcacaatttcggctcactgcagcctcaacctcctgggctcaggttattctcccacatcagcctcccaagtaggggggatgccactttgcctggcacatgccactttgcctggctaattttgtttatttttgtggacattaatctccctatgttgcccgggctggtctcaaattcctggattcaagcgatccttccacctctgcctcccaaagtgctgggattataggtgtgagccactgcgcccagctgaatgagagattttttagtgtccatgtaaattttgatttttacagaaagaagagtatagcatgaattttttcaagaatgtatatattttaatacactacctattgtcctgttgatagaagataaatcaaaaccagaagaatggaaaacagtcttttttgttgttgtttttgcttttagcaaactcggctgcaaatagcatacacagtattaggtaaaattttttcagtcatcccaagatttattaggggaagaaatgggtagacaagcagtggataaattagaagtggtaagaaaaccctagttccatgtggcttcttgttactttgtctgctgttgatgaagctgtcatccctccattatcttttcatatttattgggaaatacaatttaatctgccagactgaaatgaaaagataaatcgagtatgacttcttattcttgttcagttgggaataaatttattccagagtcttattttactcataaactgcccaagtaacatcactggagtaaatttttaaaaattacacaaactattattaagagaatattgtaaaaatgaacccctcgttcttcccaatttgtagagacagaggtcttctctgaccatgtcagtttaaaatgtaacttttcctattcttctgtgtggttagagacttctaaacaggaagtccaaacaatcatatttccataattccaagatgagtggttttccttttgcatctctgaaatcagggtgcatcatttagcccagagtggtgacccacacctgttataccaccattttggaaggccaaggctggaggatcgcttgagcctaggagttcaagaccagcccgggcaacatagtgggaccctgtctgtacaaaaaattaaaaacatagccaggcatggtggctcacgcctgtaatcccagctactcaggaggctgagacctaggaggattgcttgagcctgggaagtcaggctgcagtgaaccatgattgcaccactgcactctgggcaacagagtgagaccctgtctcaaaacaaaaaaacgaaaagctgcgtcatttgataaagcagtatgttttcctctcttccccaatcccccaatctattaagtcaatagcaatctaatgattgatgggttttgctgattaaaaaaataaaagctgtactatatgcattttataagctaaacatctaatataaaaggatgaaaaaagatgaaaataagaaaattgttaaaggaatagcagatacattaaataaacaagtaaataaacaaaaagcagatttcaaggttaaaaatcatttaatgagatcaagactattttttatatttgtaaatgtgaaaattttatattttaaggctgggtgaggtggctcacgcctgtaatcccagcactttgggaggccgaggcaggcagaccgttggaggtcaagagttcaagaccagcctggccaacatggtgaatcctgtctctaccaaaaatacaaaaattagctgggcatagtggcatgtgcctgtagtcccagctacttgggaggctgaggcaggagaatcacttgaacccaggagacaggttgcagcgagctgagatcatgccactgcactccagcctgggtgacagagcaagactccatctcaaaaaaaaaaaatttttttatattttaaaatttaaaattaatgaagttaataggactctcttaagctttatgagtttatagcacattgtaatagaatatataaaaatataaataaaaggtaaaaaatttacaataattgtgcagatttttaaactttttttggtagcagctttattcagatataatttacaaactgcatttatttcctgtggctgctgtagcaaattactgcaaacttggttgctgaaaacagcagacatttattttctcacagctctggaggccagaagtccaagatcagtatcactgggccaaaatgaaggtgctggcagggctgcacttctctcaggagggtctgtggaagaatttgttccttggctcttccaacttctggtggctgttggcattcctttacttgtggctgcatcaccagtccctgtctttgtggtcacattgccttttcttctcctgtctgagaaatctccttcttaaaaggatatatgtgattgcattttagggtctacctagataatttaggataatctccccatctcaaaatccttaatcacatctgcaaagactcttttcccatataaggaagcatttacagatccagggattaggactttacatcttcgagagccattatccaacctactatacctaccttatacccatttaaagtgtacaattgaatgggctttagtatatttgcagaggagtacaaccattaaaacaatccattttagaacattttcacccacaaaagaaacttcatacccattagcagtcactccccatttccttccaaacctccagccctaggcagccacaaatctctttctgtctccatagctttgtctattctgaacatttcatatatatggaatatacaatatgtggtcttttgtttttggcttcttgtacttgtcataatgtcttcaaggttactccatgttgtagcatgtatcagtacttcatttctttttattgccaaatgatattcctttttatgaacatactaccttttatttatccactcatcagttggtggacatttcggttgttttcattttttggctactgtaaataataccactatgaacatttgtgcctaagtttttacatgaatatgtgttttctgttctcttgggagtggaattgttgggtcatgtgataactttgtgtttaaccttttgaggaactgccagattgttttcttttcttttttttttgttatactttaagttctagggtacatgtgcacaacatgcaggtttgttacatatgtatacatgtgccgtgttggtttgctgcacccattaactcgtcatttgcattaggtatttctcctaatgctatccctcctccatcccccgaccccatgacaggccccggtgtgtaatgtgtcctatgtccaagtgttctcattgttcaattcccacctatgagtgagaacatgcggtgtttggttttctgtccttgtgatagtttgctcagaatgatggtttccagcttcatccatgtccctacaaaggacatgagctcatctttttttatggctgcatagtattccatggtatatatgtgccacattttcttaatccagtctatcattgatggatatttgggttggttccaagtccttggtattgtgaatagtgccgcaataaacatacgtgtgcatgtgtctttatagtagcatgatttataatcctttgggtatatacccagtaatgggatcactgggtcaaatgatatttctagttctagatccttgaagaattgccacactgtcttccacaatggttgaactagtttacactcctaccaacagtgtaaaagtgttcctatttctccacatcctctccagcacctgttgtttcctgacgttttaatgatcaccattctaactggtgtgagatggtatctcattgtggttttgatttgcatttctctgatgaccagtgatgatgagcattttttcatgtctgttggctgcataaatgtcttcttttgaaaagtgtctgttcatatcctttgcccactttttgatgcagttgtttgattttttcttgtaaatttgtttaagttttttgtagattctggatgttagccctttgtcagatgggtagattgcaaaaattttgtcccgttctgtaggttacctgttcactttgatggtagtttctctggctgtgcagaagctctttagtttaattagatcccatttgtctattttggcttttgttgccattgcttttggtgttttattcatgaagtccttgcccatgcctatgtcctgaatggtaatgcctaggttttcttctagggtttttatggttttaggtctaacatttaagtatttaatccatcttgaattaatttttgtaaggaagggattcagtttaagctttctacatgtggctagccagttttcccagcaccatttattaaatagggaatcctttccccatttcttgtttttgtcaggtttgtcaaagatcagatggctgtagatatgtggatgtgtggtgttatttctgaggcctctgttctgttccattggtctatatatctgttttggtaccagtaccatgctgttttgcttactgtagccttgtagtatagtttgaagtcaggtagcatgatgcctccagctttgttcttttggcttaggattgtcttggcgatgcaggctctgttttgattccatatgaactttaaagtagttttttccaattctgtgaagaaagttattggtagcttgatggggatggcactgaatctataaattaccttgggcagtatggccattttcacgatattgattcttcctatccatgagcatggaatgttcttccatttgtttgtgccctcttttatttcattgagcagtggtttgtggttctccttgaagaggtccttcacatcccttgtaagttggattcctaggtattttattctctttgtagcaattgtgaatgggagttcactcatgatttggctctctgtttgtctgttattggtgtatcagaatgcttgtgatttttgcagattgatttttgtatcctgagactatgctgaagttggttatcagcttaaggagattttgggctgagacgatggggttttctaaatatacaatcgtgtcatctgcaaacagggactatttgacttcctcttttcctaattgaatactgtgggtggcaagccacccaggtgccaaggcaagagaccgaggacgcgagctgttccagtataataaaatataaaacaagaatagttataccatatatagatcttagatatgattatatatgaatataattaatcattagtagtacttattctttattccaatattgtaataatcctcgctctataatcataacctaggaaaaaccaggccatacagagataggagctgaggggacatagtgaggagtgaccagaagacaagagtgcgagccttctgttatgcccagacagggccaccagagggctccttggtctagtggtaacgccagcgtctgggaagacgcccattgccaggcagaccgtggtctagcagtagcgtaagtgtcaaggaaaaacacctgctacttagcagatcgggaaagggagtctccctttcccagggggagtttggagaagactctactcctccacctcttgtgaaggggctgacattagtcaggctcgcccgcagttgtctggaggcctaactgtctccctgtgatgctgtgcttcagtggtcacgctcctagtccgccttcatgttccatcctgtacacctggctctgccttctagatagcagtagcaaattagtgaaagtactaaaagtctctaataatggtgtaagttgtttctctctttgtctcctctctctctctgcctcggctgccaggcagggaagggccccctgtccagtggacacatgacccacatggccttacctatcactggagatggctcactctccttatcctgcccctttgtcttatatccaataaatatcagtgcagcctggtatttggggccactactggtctccgcgacttggtggtagtggtcccccgggcccagttgtcttttcttttatctctttgtcttgtgtctttatttctacactctctcgtctctgcacatggggagagacccgccgaccctgtgggactggtccctacagaataccttttatttctttctcttgcctgattgccctggccagaacttccaacactatgttgaataggagtggtgagagagggcatccctgtcttatgccagttttcaaagggaatgcttccagtttttgcccattcagtatgatattggctgtgggtttgtcataaatagctcttattattttgagatacatcccatcaatacctagtttattgagagtttttagcacaaaggctgttgaattttgtcgaaggccttctctgcatctattgacataatcatgtggttttgtcttcggttctgtttagctgatggattacgtttattgatttgtgtatgttgaaccagtcttgcatcccagggatgaagccaacttgatcttggtggataagctttttgatgtgctgctggattcggtttgccagtattttattcaggattttcgcattgatgttcatcagggatattggtctaaaattctctttttttgttgtgtctctgccaggctttggtatcaggatgatgctggcctcataaaatgagttagggaggattccctctttttctattgattggaatagtttcagaaggaatggtaccagctcctctttgtacctctggtagaattcggctgtgaatccatctggtcctggactttttttggttggtaagctattaattgttgcctcaatttcagagcctgttattggtctattcagagattcaacttcttcctggtttagtcttgggagggtgtatgtgtccaggaatttatccatttcttctagattccctagtttatttgcatagaggtgtttatagtattctctgatggtagtctgtatttctgtgggatcagtggtgatatcccctttatcattttttattgcgtctatttgattcttctctcttttcttctttattagtcttgctagcggtctatcaattttgttgatcttttcaaaaaaccagctcctggattcgttgatttctttgaagagtttttgtgtctctagctccttcaattctgctctgatcttagctatttcttgccttctgctagcttttgaatttgtttgctcttgcttctctagttcttttaattgtgatgttagggtgtcgattttagatctttcctgctttctcttgtgggcatttagtgctataaatttccctctacacactgctttaagtgtgtcccagagattctggcatgttgtgtctttgttctcattggtttcaaagaacatctttatttctgccttcatttcgttatgtacccagtcgtcattcaggagcaggttgttcagtttccacgtagttgtgtggttttgagtgagtttcttaatcctgagttctcatttgattgcactgtggcctgagagacagactgttgtgatttctgttctttaacatttgctgaggagtgctttacttccaactgtgtggtcaattttggaataagtgcaatgtggtgctgaaaagaatgtacattctgttgatttggggtggagagttctgtagatgtctattaggtctgcttagtgcagagctgagttcaagtcctggatatccttgttaacctgtctcgttgatctgtctaatattgacagtggggtgttaaagtctcccattattattgtgtgggagtctaagtgtctttttaggtctctaaggacttgctttatgaatctgggtgttcctgtattgagtgcatatgtatttaggatagttagctcttcttgttgaattgaaccctttaccattatataatgaccttctttgtcccttttgatctttgttgatttaaagtctgttttatcagaaagtaggattgcaacccctgcttttttttgctttccatttgcttggtagatcttcctccatccctttattttgagtccatgtgtgtctctgcacgtgagatgggtctcctgagtacagcacactgatgggccttgactctatccaatttgccagtctgtgtcttttaattggagcatttagcccatttacatttaaggttaatattgttatgtgtgaatttgatcctgtcattatgatgttagctggttatgttgcctgttagttgatgcagtttcttcctagcctcgatggtctttacaatttggcatgtttttgcagtggctggtactggttgttcctttccgtgtttagtgcttccttcaggagctcttgtaaggcaggcctggtggtgacaaaatctctcagcatttgcttgtctgtaaaggattttatttctcctgcacttatgaagcttagtttggctggatatgaaattctggcttgaaaattcttttctttaagaatgttgaatattggcccccacactcttctggcttgtagggtttctgctgagagatctgctgttagtatgatgggcttccctttgtgggtaacccgacttttctctctggctgcccttagcatttttccgtcatttcaaccttggtaaatctgacaattatgtgtcttggctttgctcttctcgaggagtatctttgtggtgttctctgtatttcctgaatttgaatgttggcctgccttgctaggctggggaagttttcctggataataccctgaagagtgttttccagcttggttccattctccccgtcactttcaggtacaccaatcaaatgtagatttggtcttttcacatagtcccatatttatttgaagatcaaattaatgaaatgaagcgagaagagaagtttagaacaatgccagactgttttctactgtagttgcaccattttacattcccaccagcggtttacaagggttgcaattgtttcacatccttgccaacacttattctctgttttgttttttattatagccatctttatgggcatgaagtggtagcacattgtgcttttgaaatgcatttccctgatggctaaaaatgattttgagcaccttttcatgttcttattgttcttattggttatttctttttttttttttttttcttttgaggtggagtctcgctctgttgcccaggttggagtgcaatggtgcaactggctcactgcaacctctgcctcactgcaacctctgcctcccaggtccaaacgattctcctgcctcagctttccaagtagctgggattacaggtgcttgccaccacgcccagctaatttttgtatttttagtagagacagggtttttccatgctggccaggctggtctcaaactcccaacttattggtcattactatatctgctttggaaaaaaatgtttattcagatctcattttaaaattgggttgtctttttattattggatcataactgttctttatatattcaatcctttatcaaatatgtgatttgcaagtattttctcccattctgtgggttgttttttaactttcttgatggtgttatctgaagcacaaaagttttaaatttttatgaagcacaaaagttttaaatttttatgaagcccaatttgtctattttttttcttttgttgattttgcttttgatgtcatatcaaaaaaccattgcctaattcaaggtcatatattcctgtgttttcttctgagagttttatagttttagcttttacatttatgtctgtttaagtctttgatccactttgagttaatttttgtctatggtgtgaggtagtaaaactttttaaaagtctttgataaactgaagaggtaagaaacaaataagaatataaagaacctattaatatcaataactcattatatgtgtatattgaactttaatccttacagtgaccctcttccaattttcataaaattttggtcaaaattcattgacaataggccacaaagattgccttataagttccaaaaggtagaaatatgacatggtatattcttttcttattatgtaatacaattggaaaacaataaacttaaaaattaagtccaaccatttgaaaatatttaaaaaactctcctcaataacttttggatcaaaatcttatatctaattttatggaatgctactaaatgtgtactcagatgagaaattataatcttaaaacttttaaatgagataggatgaggaatttttgaaacacagataaatacaaaacaatagaataacagccagccacagtggctcatacctataatcccagcactttgggaggcttaggtgggaggatctcttgagccccaggagtttgagaccagcctgggcaacataggaagacctgtctctacaaaaaatttaaaaattagcttggcacaatggcacgcacctttagtcccagctactcaagaggttgaggtgggagtaccgcttgagctcgggaggttgcagctatagtgagccgtgatcatgccactgcactccagcctgggtgacagagcgagaacgtgtctcaaaaaaagaaaaaaaaatcaatccaaaaaccaaccaaacaaaaaaccacacaaaaaatagaataacaatatgcatattaccgtcacccagaattaaatcttgttactttggcatatttttctaaggaaaattattcaatgttgtaaaagtgatacaggaccattaaaaagaatccaaacaacacataaaagtgcaaagatgagaatttttaaatcatcattaatttcttaggtgaacatcaaaacaggtttatatactacgccactacagatagatgggtacatagcaagtagatgatcataaatagttacaagcatttgattacttagaaaataaaaatataattgtacttgactccaacagaggaaaaagacactaaagtgaaaataagggaattaccgaaattaaacataccttcacaaaatttattctaaagacattctaagaaataactatacatatctgtatatctctatagcaatatatatcacaaaagagtgcagtcattttttaaaactacatattttaattttggaaataacaattgatatcctaccataaaagatgagagtatttaatattttctcatatctttctttttgtctatttcccagttttagttattttataatttttattttatccagatttacactattcaccttcttttctgtaattacaattgccatagttgattaatcttaattcaatatttaaatggatccaaggctcatttcctgtccttttacaatgtgttttgctattcccaaattatttattttgattcatctcttacttggctgaatttattgtagttttttaaagaagatcacatgggtgctatattttctgagttcttatatattgagaatgtctgcctacacagtgcctttatacctaaaccataccttgaatggtatactgtaattgggtcactttttttttcacctaaaacaacataaacattgcttaattgtttcctggtattgaatgttgtggagaagtctgatgtcagtgtttttttttttcttcattcattttaattagttcaaaaaatattttattgattgccaggcattgttctatgttctgttattaaaacactggaaaaaaagaaaacagaaaacagaaaagtcagtgtcttcctgttgcttattttgtaggtgacttggttgttagcttgaagttcatcctcaaagttaaagagtttaagtagaattgtcttggtatagagcattttgttttaaaaatgtattgaatatggtgtgatcttttgatttttattgtttttttttcatttcaggaacattttctcatgtctttgaatacatcttatattctatttttggactgcctacattagggaaactaaatatccttatgtaggattagatttgttctttctaattttattaattttcttgtcttttcacctgaattcactgtgataatctaaacctttctctctgtcaataattccattttatgatgcttgcgcttttaaattttgatgctcaatttggctgcttacacctaaactctacccttttatctcattctgctgtttcatcagcttgtctttgagttcttgtcatattgaatctgtgttcctattaagttgttctatagcttaaagcaatggcgaggaactttttttgttttttagctattttttgctagattgagtttatctatttgcttttattctccctgtgttgtttgcacagttgccacaatcctatgttacttctttttgtagtccttgtgcttgcatgatcctgccctaatttctatttattctgatatggtatggatgctttcttgactttcttcctagcctgacaccagtttgttttcactttgaatcttcagtttagaggcttgacattttcttttctggtgactcttctgattcctcctgttagagtaagagaggaagagaagaggaaagtgcctctggaacaaatgcagtctttgtaagcatgcctgggctttgtattctgttttattccatccatttattcatttatttattcaataaatatgtttgctcttatttataatgaacattctgataaataccaagctgaagagtttccctctatgcttaatttaattgagtgtttttaaagcaaaaattgattttgagtattatcaaaaggcttattttatttattgagtaatcatatgattatattgatttattctattaatataatgaattagatcaacaaattcccaaatattgaaccatccctctctccctctctctttttttttttttttgagatggagtttcactcttgtcgcccaggctggagtgcagtggtgtgatctcagctcactgcaacctccgccttcctggttcaagcaattctccagcctcagcatcctgagtagctgggattacaagtgcctgccatcacacctggctaatttttgtatttttagtagagacggggttttcccatattggccaggccggtcttgaactcctgacctcaggtgatccacacacctcggcctcccaaagtgctaggattacaggcgtgagccaccgtgcccagcccatccctctgtttctagaataagcctcagtcatgcatattttagaagaattcctaaaatcagtcttttaattctcagttgtgcttttgttcttcatctattattcagcgcctctatttagtttatttttatcaacatttttaattgacaaattataatacgtgtatttatgtacaacgggatgtttatatatataaaatgtagaatgattaaatcaagctaattaacatattcatcatctcacatcatttttcaagattttacatatgtgagatcgtgttgtatttgtctttctgtacttggcttatttcacttagcataatgtcttccaagtttatccatgttgtcacaaatgacaacatttccttcttttttaaggccaaattatattccattgtgtatatacaccacatttaatctactcattgttaatgaatacttagatggttccatatattggctattgtgaataatactgcaaagaatattagagtacagatttctttttggcatagtctctatttagttaaaaattgtgttataattgttatttctatgaatattttccttctttcggcttagtttaagttggattttacctatgcactattctttttttttttttcttttttttttttgagacagagtctctctctgttgcccaggcttgaatgcaatggcatgatctcgattcactgcaacctccgccttccaggttcaagcaattctcctgcctcagcctcccgagtagctgggattacaggcgtgtgccaccatgcacagctaatttttgtatttttagtagaggccaagttggccaggctggtctcaaactcctgacctcaggtgacccacccgcctcggcctccctaagtgatgggattacaggtgtgagccactgtgcctggcccacatatgcactattcttaaaatctgtagtatgtagtcttgtttataattatactctgagaccctataaagagacatcccaagataatatgaattcatctttcatgtgatggcagttgactctcatcctccacagcaggctcaagcctgaccttccaataaggtgactctgaaccagtgcaattaaattttttggaccccactgtggtcactttttaatgtgtatgccagctgttggggttacagaggtaagtgaggagacaaacaggcaaataattacaaattattgtatcagcatgtcagaggaggaacattaacagagtaggtgagccaagatgtctcagataatatatatagctgggtcttaatatgtatgtagctggacagatgtaggaaaagcagaaaggctttccaggaaggaacaacatgtaaaaagacataaaggtctgaaagagtatggtttgtctacatgataggaaataatttttttttttttactaggatgtgaggaatatgactggggaaggatgagaaataagagaggaaagttaggttagaactccatctacaaagatattatatagaatgctaatgagtttatataagtactattaggtatatatcacctttaccccattttctcctttgtgtcattttttatatatataacatataaatatttaataaatatggtatatattatatgtaaatatataaatatttttacatttatataaaatatgagcatgtatttgtgtgttgttatatataatataatgtttattaaatatttatatataaatatatataatacatgtatataaaacaacacacaaatgagaaaatggagtgatatacattatttattttatatatataaacaaatataattttgttttaatggatggcttgatctaattaatattagttttcctgaaatttcccactttctcttcttgaagtgcaaacagcacacaatcagacactttcattataaagaagagctgttacctgaacagaaacaagaaagtatttcttacatagaaatatttattgaaagtttttagttatctcaccaacaaatcattgggccatcccatatgacatagaagtagtgtttggagcacttgctttcaaagagattgctttaaagctatcttatcagtactcatttaacgaaactggaagataatgtaataataaatgttgggcttgaagtagagatgttacacacaggtgccgcctagtggagatactatgtcatacaattgcccctcagatcatttgtaaagagcaatgtaattagtactcaggatggagtatggagaaaactgagtcactgagtaataattaatatagagaaaaagagaaatggagagaatgaatgtcacagatgccttcatattcctaccattttcctagcgtatctgttttctgatggataaatgaacaggtgataatctgtttgttgactgtgacctctctcacttttcatctgttttatcatagtaaatgaagacccaaagtaactactttagaatgtttacttctggtctcttagttattaagaaaataaaaaatatttactcaatacaataatgcattgttgtatgggagtgtgtctgtaggtatatgcaggaatttatttccccgtctgagggttggagacacacatgtgcacagacatactggattggactagggtagaaccagagaaggagaggatcaaaatattagtaaattaaggacacatgcaggcacgcacacaagcacgtgcacacaaacacacacatataattacaaagcaatgaacagacggcaatgaacagatgcaaacattataaactagtatattcattgctgctgagggatgcatagcagaagaaaagtgagacttcagcagggtgggttaagtgtaggaaactcgtctggtggtcgtgagttttaattttcttccaccttccactttgtttccttacttcagaaagaaccttaagaacaatgttttcaaaattcatatactgacggaaacaatttaaaaggtagaatatactggtttattttgttttgttttataagtcaagtgtttagaaatatgttttaggactatatcaggtttgttttaaattatcagaacactagcaaatgtaaaagaacagaaattataacaaactatctctcggaccacagtgcaatcaaactagaactcaggattaagaaactcactcaaaaccactcaactaaatggaaactgaacaacttgctcctgaatgactactgggtacataacgaaatgaaggcagaaataaagatgttctttgaaaccaacgagaacaaagacacaacataccagaatctctgggacacattcaaagcagtgtgtagagggaaatttatagcactaaatgcccacaagagaaagcaggaaagatccaaaattgacaccctaacatcacaattaaaagaactagaaaagaaagagcaaacacattcaaaagctagcagaaggcaagaaataactaaaatcagagcagaactgaaggaaatagagacaaaaaaaacccttcaaaaaattaatgaatccaggagctggttttttgaaaggatcaacaaaattgatagagcactagcaagactaataaagaaaaaacgagagaagaatcaaatagacgcaataaaaaatgataaaggggatatcaccaccgatcccacagaaatacaaactaccatcagagaatactacaaacacctctactcaaataaactagaaaatctagaagaaatggataaattcctcgacacatacactctcccaagactaaaccaggaagaagttgaatcactgaatagaccaataacaggctctgaaattgtggcaataatcaatagcttaccaaccaaaaagagtccaggaccagatggattcgctgccgaattctaccagaggtacaaggaggaactggtaccattccttctgaaactattccaatcaatagaaaaagagggaatcctccctaactcattttatgaggccagcatcatcctgataccaaagccgggcagagacacaacaaaaaaagagaattttagactaatatccttgatgaacattgatgcaaaaatcctgaataaaatactggcaaaccgaatccagcaacacatcaaaaagcttatccaccatgatcaagtgagctttatctctgggatgcaaggctggttcaatatatgcaaatcaataaatgtaatccagcatataaacagaactgaagacaaaagccacatgattatctcaatagatgcagaaaaggcctttgacaaaattcaacaacccttcatgctaaaaactctcaataaattaggtactgatgggacgtatctgaaaataataagagctatctatgacaaacccacagccaatatcatactgaatgggcaaaaactggaagcattccctctgaaaactggcataagacagggatgccctctctcaccactcctattcaacatagtgttggaagttctggccagggcaattaggcaggagaaggaaataaagggtattcaattaggaaaagaggaagtcaaattgtccctgtttgcagatgacatgattgtatatctagaaaaccccattgtctcagcccaaaatctccttaagctgataagcaacttcagcgaagtctcaggatacaaaatcaatgtacaaaaataacaagcattcttatacaccaataacagacaaaaagagagccaaatcatgagtgaactcccattcacaattgcttcaaagagaataaaagtacttaggaatccagcttacaagggatgtgaaggacctcttcaaggagaactacaaaccactgctcaatgaaataaaagaggatataaacaaatggaagaacattccatgctcatgggtaggaagaatcaatatcatgaaaatggccatactgcccaaggtaatttatagattcaatgccatccccatcaagctaccaatgactttcttcacagaattggaaaaaactactttaaagttcatatggaaccaaaaaagagcccgcatcgccaagtcaatcctaagccaaaagaacaaagctggaggcatcatgctacctgacttcaaactatactacaaggctacagtaagcaaaacagcgtggtactggtaccaaaacagagatatagatcaatggaacagaacagagccctcagaaataacgccgcatatctacaactatctgatctttgacaaacctgagaaaaacaagcaatggggaaaggattccctatttaatcaatggtgctgggaaaactggctagccatatgtagaaagctgaaactggatcccttccttacaccttatacaaaaattaattcaagacggattaaagacttaaacgttagacctaaaaccataaaaaccctagaagaaaacctaggcatgaccattcaggacataggcatgggcaaggaccaaaagcaatggcaacaaaagccaaaattgacaaatgggatctaattaaactaaagagcttctgcacagcaaaagaaactaccatcagagtgaacaggcaacctacaaaatgggagaaaattttcgcaacctactcatctgacaaagggctaatatccagaatctacaatgaactcaaacaaatttacaagaaaaaaacaaacaaacccatcaaaaagtgggcaaagggtatgaacagacacttctcaaaagaagacatttatgcagccaaaagacacatgaaaaaatgctcatcatcactggccatcagagaaatgcaaatcaaaaccacaatgagataccatctcacaccagttagaatggcaatcattaaaaagtcaagaaacaacaggtgctggagaggacgtggagaaataggaacacttttacactgttggtgggactgtaaactagttcaaccattgtgaaagtcagtgtggcgattcctcagggatctagaactagaaataccacttgacccagccatcccattactgggtatatacccaaaggactataaatcatgctgctataaagacacatgcacatgtgtgtttattgtggcactattcacaataccaaagacttggaaccaacccaaatgtccaacaatgatagactggattaagaaaatgtggcacatatacaccatggaatactatgcagccataaaaaatgatgagttcacgtcctttgtagggacatggatgaaattggaaatcatcattctcagtaaactatcgcaaggacaaaaaaccaaacaccacatgttctcactcatagatgggaactgaacaatgagaacacatggacacaggaaggggaacatcacactctggggattgttgtggggtgggcggaggggggagggatagcattaggagatatacctaatgctaaatgacgagttaatgggtgcagcacaccagcatggcacatgtatacatatgtaactaacctgcacattgtgcacatgtaccctaaaacttaaagtataataataataaaaaataaataaataaataaataaataatcagaacactttgatccccaaaagacaactcattccaagagacaaaacttaacaatttgtatcacttttaacactggtgccgagttccctatacaagtttgaaaagacatagaagtcttatcccttagacttcagtggacttccattagaaaaacaagctgcattgtcttgtgttcaggccaagagtatgcaggtgttgttaggcagatcctttctgaaattcccatcatttaatctgacagaggatctactctttcatttcattatctagttggttaatttgtttaccagcaaaagaaaaccactataaaagtatatttgttttattcaaacgtcattaatgtagttattaaaaatttaattaactttttaggtaggagagttctcttttatttccaggacttttttagttgtacatgttcctctcattttattgttctaacaaggtccatacagaattctcttggtttcaccttcccatccttgatgataagaatattgctttccttctagtatagagagggcatatttcttttgtgttttaatttttttgtagaaatgggatcttgctatgttgcccaggctggtctcaaactcctgacctcaagtgatcctcctacttcagtctcccagagttctgggatttcaggtgtgaaccgctatgcccagcagggggcatctttcacaagaaaatttcatcttctgcttttaaaagacaaaaggaggtcagaatgatttccttgtacctccttgtacctttttttttttttttttttttttttttttttttttttttttttgagatggagtctcgctctgtcgcccaggctggagtgcagtggcgcaatctcagctcactgcaagctctgcctcccaggttcatgcctttctcctgcctcagcctcccaagtagttgggactacaggcgcttgccaccaggcctggctaatttttgtatttttagtagagacagggtttcaccgtgttagccaggatggtctcaatctcctgacctcgtgatttgcccacctcggactcccaaagtgctggcattacaggcgtgagccaccatgcccagccacaccagtcttttttttttttttttttttttttttaggcacttttagctcagaataattcttatggcaaagtagcatatttgggggtggcatattctgaacttcttcacatgtataccacagaatatgaactctctttatactttattaggtgtggttgtcccaatggaatgatgacagaaagatgctgcagacacagctaaaggctgtgacgtttcttttatggcaaaggatacagatatagacagtttgttatgtaaagcaggatatgatacagcatacgtccaaacagaagtctcccaaaggtctccacagggattataccatcggcatgcatcgaggtatagggtgtcaagccatcctggcttgcctgggactgaggagttttctggaacatgaaactttctgtgttaaaaccaggtttttggttccaggcaaagtgaggcacttggtcactcgatttgaggagtttacttggctatacttacatgctgtccagaccttactgcccacctgattattgtggcgactctagccccacgtcttcctgcttaccaggggcaagtgaaaacacccaatacattcttctttactatgagactatataaagcaaaggtcagtttcccaggtgcattcttcagtagacctgggcctcaagcagtctgaggtccactcctgaatcatataatgggtttaagaataattatatgcaaaactacaaatactagaaagtatgggattcagatattgacttttgattctgctacacggaggaactgttgtatcccttagccaggaggaataagggccatgcctctgcctggattctcttttttgggacccattctgttcttgctcagtggtggtccactctgagatggtcacttccttatgggattgtttaatatcagtcatacaatctgaggccttcaaactgatgtggctccaagtttaaattttaaagagaaaggcttcgtcaactgtacccaaagattctgtctttcctttaatatactctaataaatccaggctgtgcatttttcttacaatgatatttatctgaatggctttctattctgtctctagttcatctgtatcttgtattttttgcttgttttgctcattttgttttttatgtgctttgagctgtagcatggaaagacagaaaaaataatcacagcttttggcgaggttgaggcaagtatgttgtgaaaatatatgagaaaaacttggggagaaatgagagaattttaagccgggaaaataggtgaactaccctccaattggatgtgtctcttcctaggcagtcttcaactatgggaaacataaatcaaggacctgcctgatcaacaaatccttattggctgtattagtttgctagtgctgccataccaaagtaccacagattgagaggtttaaacaaccgaaatttaattcctcacaactgtggaagttagaaggctgagacaaggtgttggcagggttggtttcttctgagggcctctctcattggcttgtagatggctgatttttgcccttgtcttcatagtctgtacactctgtacatgtctttaagtccaaatttcctcttctttaagaacactagtcagattagagcccaccctattgacctcattttaatttaattacctctttaaagaccctatctccaaatacagttatattttgagataccgagggttaggctgtcaacatattaattttagggagtaaaacttagcttataacattacctaagctatcgttcaccatcagaggcacatttttaatttgtcatttttattattactagataataaatgtggcctttgttcaattcatttgttaagcaaagttttgaaaaatcagaagagttaaaagtatgttactactttgttaagtacagatgctctttgacttatgatgggattacatcctggtaaattcattgtacgttgaaaatatctaagtaaaaaatgcatttaattcatctaacctactgaacatcacagtttagcctagcccatcttaaatgtgctcagaacacttatattagcctacagtcgcaaaatcatctaacaaaaagcttattttataatgaggtgttgagtagctcatgtaatttattaaatattatactgaaagtgaaaaacagaattgttgtataggtacttcaaagtactgaatgcatatcacttttgtgtcatcataaagtggaaaaattgttaaattgaaccatcataagtcaggggctgtctgtatataattagcactaatctttttttttttttttaaagtttcctccctaaaactggaaagctaattttctgcccacaggctataggaacacaccatttcttcagtgatagataacaaatataacctgagtacttcaatattctgtactccttgtttgcactcctcgtatactaccagggcttacaaataccgtttggaagttaatacctaagatagatagtttccaaacatagttttctttctattgctcttatatcacccacttcatcaactcttcagtatgtctacaattaaataagtatgaatcccactggcccagagctatagaatcttataatagctattaaatgtgatatttaccacattctcagcattaagtcagaaaggaaaatcccagaattcattacattgggacttagcacatagagataacttgactaagtacagttcaaatgtttaacatctcacagagatattaactgaaaggtattggtaattatattcttaaattaagcaatctttccttggaaaggtatgaaaacacaaaggctcccatcgattttcacctttttctgtttttacaagagacattggcaaacttctgtaattatctggaatttgatttgtagttgatatcgccaactgttagtctttatgccagctagcctaaacttacagaacaatcagaatatgctaactcagaaaaccgacagactatagctccagaatattttttttttccatcagaactttcagggatgaaaaatccagaagtgtctctcagaaaaaggtttgtttgtttgtttgtttgttttgagacggagtctcgctcgctctgttgcccaggctggagtgagatggtgcaatctcggctcattgcaacctctgcctcccgggttcaagcaattctcctgcctcagcctcctaagtagctgggattacaggcacccaccattatgcctggctaattttttatttttagtagagatgaggtttcaccatgttggccaggatggtcttgaactcctgacttcaggtgatccgcccacctcggcctcccaagtgctgggattacaggcgtaagccactgcgcccagcccagagaaaggttttttaactaattcttttttttttttttgaaacagggtcccgctctgttgcctgggctggagtgatgtgatcatagctcactgaaaccttgaactactgggttcaagtgatcctcccacctcagcctcctgagtgggactacaagcgtgcaccaccactcttggctaaatttttaaatcttttgtagagatgaggtcttcctatgttgctcaggctggcctcaagctcttggcctcaagtgatcctcctgcctaaaccttttaaaactaattattgattcaatagcattcccacagccagaaagctcatatggctttgaagtcaattcccaaacacttaatttaaaattggtgttcttccaaataccaatttttttttcagcattagaggattgagctacattgttgccagaaaaggtcaattattcaataattctgacttatgagtaatatagaaaaatacctactagtcaagtaaaaagtcattaaggatcaaacaacaggatcttaggatacgggactaatcaggaccagataccccagatcatgtagttcagtggttctcaaactttaacaagcatcagaatcaccagggaggcttgttaaactatagattattgggccctactcccagaatttctgattcagtaaatatggggtggggcctaaaaatttgcagttctgacaagttctcagatgatgctgatgctgttggtctagggatcacactttgagaaccgctgatcttgttgggttttctccttctaaagttgtttatcagctaagaggactgtttatttaatgaagaagatgttcttggccaatttgttacctacctcaagagtagacaaacacaatggctgaagagaacttactacgtgaaacacccagatcgtacataccataactcagtgaggtaactactactgtgatacccatttcacaaatgaacggatatgagaacagggagttgagcccagacaggcttcagagtgagttcttaaccacttccactactctgcttgttcccatggtaacagctaagaacttaactgtgtgcattgatccatcaagaataatgataatgatgctgggtacagtggctcatgcctgtaatttcagtactttgagaggctgaagcaggaagatgacctgagcccaggagtttgagaccagtttgggcaacatagtgagaccctatctctacacacacacatttttttttttaattagccaggtgtggtggctcgtacctgtagtcccagcaactcaggaggctgaggtaggaggatcacttgagtcttgtgaccaaggctgcagtgagccatgattgtgccactgcaccattgcactccagcttgggcaacagagtgagaccctgtctctaaaaaaataaaaataaaaattatatgtcaatgaaatatgccaaaaacatgttccattttaaacaaattactaaagtggaacatgatttttacaaaccatgttaaatacatgctaattacaagaaccagaaaccaacctgagctgaatatgtacaactgaatatgaaatgtgcacaatccaagggcttcaggaagagactagaacaaggacttggaaagtgttaagactgtttctctctgctttgcatttcatctgtttctctccataacagactttcccggcagtctcagttcacatggaggaatctggccaccccaaaactcttaaatttacatttgaagggtggcaaaatatgctaccccgaaacattccactttggcataaggattactttcagctaaaggcacttgaaaaatagatacaagaagggcattctaatctctttttcttctggagaataggaagttaaaatctcccatgtaaaagatgtcctccctgtatcaggagaaaggaaacattattcaactgggagtcttagctgagagaattctgtacaaacagaccttgttaaaataattattatcttccttttagtttcccaacataatttagttacttttccacaattgcctctctttgttcaactcaatatattaataaaagcatgtagtttttgccatttctttggatcttcatttctttatgacagctcctatgtcacataaaatttatattaaatctttattcctttctcctgctaacctatcttatgtcaatttaattctcaggcccagccaaagaccctaagagagtagaggtaaaattttgcctcgactacacattcacaaattcaggcccactcagattaactggctgttactcagttctaatccccaattcctagtggagagaatctgaatggccttaagtgttccccctggttcaatcatttatggctatggaagtgggatcatgcagtgtaactttggctacctctgtgcgtgaggcaggggaggaaatcatcggctgtgagctgagctcacacttttttttttttttgagacggagtctcgcactctcgcccaggctggagtgcagtggcgccatctcggctcactgcaagctccgcctctcgggttcacgccattctcctgcctcagcttcccgagtagctgggactgcaggcgcccgccaccacgcccggctaattttttgtatttttagtagagatggggtttcaccgtgttagccaggatggtctcgatctcctgaccttgtgatccgcccgcctcggcctcccaaagtgctgggattacaggcgtgagccaccgtgcccggccgagctcacactttaaaaggagtgcactcagaaactcttgcagtgcttgatcacttctctctatcacaggataccttctatctcttaaagtgtagaccaagaatgtaattcgttcctgacctatcaaattggcaaaaacccagatgccaatatacactgatggtgaggctgagaagaaataatcactcatgcattagtcataggagtgcaaaagtgggcaagccccatgtcaaacctacaaaatattcaggtgcattaatcctctaagctagaaattccacttctgggaatctactcaacagggatcaagagaaatggccgaagagtatagacgttttcagtccctatactttaaaagaagatcatagacaaaggatatcttattgcaatatcaaaaaacaaaaagccacccatgatccttgtcgcttacactccagtaattaaatgcagccagtcttgcaatacacatgcttttatataccatataccatagaaaaactgcattcaatttttaggacttttaatttgcaggtagcattttacaggcaactactgctatttcatactgtgaggaaagtctgccctatataatgttgatgtgatatagagggaaattgctccaaaaatatctagtcccactgatgtgtggtattggggactgcattagttacctctctctgcatcacagcttttacagcagctagcatgaaaatgcttcatctaagtgataagcaaatcatatggaaacattttacagccaatgtatttcatgcacattggttgaatcctggggaaaatccaagtagagcatggttttaagtcaatcgtttatcctcttttttttcccctgtagtacatctcttcacatattaaagacttgaagagtgaaatgtttgaggaacttcttaagcacctttgccactctgcagatgaatttcgggaggtcataaaagctgacatgcggaggcagatgttcgctgaactcttcctacattgtgaccacgggaaggtgggttaagacatttaaataattgcttcttggccagacactgtggctcacgcctgtaatcccagcactttaggaggctgaggctggtggattacttgagcccaggagtttgagaccagcctggacaacatggtgaaaccccatatctacaaaatagatacaaactttactgaaatatatttgtttatgaaccttatatttatttgtttgtatctccatgtccagaaagaatttaagtaagcctgcaagaatagataagatgcaaaaacaaaatgtaaactaaaagtaggatgaaagaagaaaaaaataagagaggggatagtaaatgaagctgggaacaaagccccaaaatgcataacataatgacctaaatagtcattgtgggttgtttacaagcttggatctgagcttcctagcagtgaatgtgaaaagggaaacatgaccaaacacactattaacaatgtttataagataattacaaacaagtgctaagaagcacagaaatttggggttcaaattatagttaggagcttctctttataaaggggcccttatgtgctgaagtcaaaatctttcatgatgggcttgtaataaattaaacaatgacttttttagggcagtttcttatagttacttcaaatgtaggcaaacgatgccacactggactgcaattcagaaaaagcaattcttaaaagaaccgatatattgcaatctaggttcttagattcctgctaatttaaatgaagtcaggaatatattttataaaatctgaaatgtctatgtgtctttcagttaatccttattgaatattgcttcttttaacagagcttgtaataaatattgagtgacaagtgtcaaagttttactccctggtaaaatgcctgaaggacaactattctctgttggccaatttaacaccaattcgtgtgctgtaacaaacatagtgggataatatttagagcaattaattgaggtttgctttcattctttgcttttcttcccatcattcaagcagtagttatatgctgatattgaaagtgcaggggcagaaaaactacacttccatcctcgtaggattcctgctgggtctgagcattaaactgacagaagatagaataacaggagaaaaccatacaaatttagttacaagttttatatggcacaggagtcctcttaaggaaatgaagacccaaagaagcagttagagccagttacttatgtactggattggacaaagaacagtaaaccgtgaaaatgtgattaaattatgtggggagtcttataagagttattctaacaaggtctgtacagtattctgttggtctcaacttctcatccttgaagataacaattatgcctttccttatagtatagggagagttactttcacaggggaatttcatcttctgctttgaagaaacagcacgaaggtcaagtgatcttctcatatctgttgcttttcaagtatctttaacttagtcaatatgccagaatagcatattttaaccccttcagaggaaagatagagtctcaaaaaaagaagttagatgagtttctgaatggaatatatatctgggaacaaagccccaaaatgcataacataatgactatgtatatgtcttatacacacacatgcatatatataactatatatttgtatatattttatatataaccatatatttatatatattttatatataaccatatatttatacatatttaatatataaatatatatgaggcactctatatataatatataatatattattatatataatataatatatgtatgtataaatatatcttataatatatatgtatattatatatgcatatataatgtatgtatatataaatatagaatatacatatataatatataattatatataatacacatatataatatataattatatataatacacatatataatatataattatatataatacacatatataatatataattatatataatacacatatataatatataattatatatataatattagagagagagagagagagagggagattgcacctgtgagagacagagcctcactctatcacccaggctagaatgcagcggcatcatcatacctcactacagcctctaccttctgggttcaagtaatcccccaacctcagcctcccaaatagctaagactacaggcatgtaccaccatgcctggctaatttttaaattttttagaaacagagtcccactatgttgcccaggctgttcttgatctcccagctctagagatcttcccaccttggcctcccaaagccctgggattacaggcgtgagccaccacatccagcctcgaatgtatctttttaaccagcagctgagacaaaagttctaaaagcccagactttaaatggaaaatgctgggctcttaagaaataatggagaatcataaagtaaagaagaatgcaaaatatggcatcaaagcagttattctatcaatgggaaattgtgaccagctgaagagagaaggaggttggagtgtgtgtgactagaatttaaaggttgtctgggtccctaagtcagagttagcacctgatctcccattcctgagctccaatcatggttggagattgagggcaacattattgatacccctggaaattccaggtaggttgagaggaaatttaagaacagcaggcacttacacttcattttctaggtgtagctcagagactacaagcttcatagagaagtgctaaatccaacatggcactaaagagaaagagtagcagctatagaaggtagggtgtaggtagatgggcctgaagatactccctttcactcctgtggccagaggaaagatgatgagtattcctaaatacctgtgtgtaaaggacagtcggtgtgcagagatgatgactgtgaaagttctgggagtacccccaagaagacacctgggttaggacaaggataactatggacataaatagcaaataccaaaataaaacttccaaatgactcaatgagatgaagtacatacaccacagtcacagtcaacaagtactgtggctggcattgagctagactctcctttctctgatggcaggactctatataagcacccccaccccccaaaatatgggcgaaagatatgaacacacaattcatggaatcactatatactcaataggtgaccaaaaatagtttttaatgataatacctatcactgatatgaatagaagaaaaacatttctcaaacattcctggtgaaaatttaatagttgtatctttgcaaagcattctggatatatctacttaaatgaaaaatgcatacgtgcttcagccaggcaagccattcctgaaatttttattccatagaaataaaagtattagtaaattaaaaaatacacatgcaaagaaaattcttgatgcattgtttataaatgaagaaaaagagagaagttaatgaaatatttactatataggggaatgctttaagcatccctatttcctgagatacaacaatattaaaattaggccaattaataaccctagaaagggttattaattgtgtgcaagtgaaaggaagagtcacatatctctcactttaaatcaaaagctagaaatgattaatcttagtaaggaaggcatgttgaaagccaagaggtggctgaaagctgggccccttgctccagttagccaagttgtgaatgcaaggaaaagttcttgaaggaaattaagagcactactcccacaaagacacaagtcataagaaagcaaacagccttatttctgagagaagtcaatgcctggcttcaaagcttcaaaggcctagcagactctcttcttagaggctagtgcagctggtgactttcagttgaaaccagtgctcattgaccattccaaaaatcctagcccttaagaattatgccaaatctactctgcctgtgctctataaaggaaacagcaaagcctagataacagtagatatgtttgtggcatggtttactgaatattttaatcacactgtggagacctactgctcagaaaaaaagattcctttcaaaatattactgttcattgagatgcgcctggttaaccaagagctctgatggagatgtacaaggagatgaatgttgttttcattcctaataacacaatatccgttctgcagcccatggtcaaggagtcagtcattttgacgttcaagtcttgttacttaagaaatacatttcataaggctatagcttccatagatagtgattcctttgatggatctgggcaaagcaaattgaaaatcttttataaataattcaccattctaggtgctcttgccactgttccatctgtgattgagcatcctttctgcagaaagtaaagatagccttgctgagagatcttttgtatccatgctgatttttcttcttggcaccaattatctatttctaacaattttggtatttctaacaattttggtggcccatatggggatacattctcctctggtgttggtctctggtcctttctcatgaggaggcgccccaccgcctcttgtggtggcctcaggggtaagggaccgagacccacctggtgtgacgaataaacccaaactctcagcaatgcagaaagaaaccagccagcaacctggggtaaaggatcctcacatactgcggtgccgagtctgtgcacagaccatacaaggagaagccgcaggagccgtcttttagcacagctaccacccttagaatttccggtaaaccaacaccatcctgagaaccacatcctcaccaaagggtggaaagaagggaaactcaagctagcctgggaaggaccctacctcgtgctgctaaccaccaagtacggtggaaaggggatggacacatcacacccgagtcaagcaagtgccgttatcatcagaatcatgggccattgttcctggatcaagccctaccaaattaaagctaagaaaagcttcatctttccatcttttcctttcctttccttccctctaactatccctcatcttgtcatcagtgtaaccaaatcagattcaccacaggttataacatttgatgcttgccttgttataccttgtggaggtttgcaaagccagagacaactctctacttcagaaaaatacctctgccactccagggagaccactgccacccctgcatcttgcttgtggtggaggtaccaagataccccaagttggaatttatatgctcagtgggtagatgtcatctggatcaaggctggacctccgaggagggatgtgccgacttaaagccatacctccaccttactaaagggattgcccctgccccaattgtcaatcccaccagtgtaacccagtgcttatatccattactattcctaccactagcaactctaaccccactttagagcgtttctatggtttaggatcagaggtcactggaaaggatccttctttaagatgtgctttgttctcccttctccacctcctacaactgcccttttcccaaatctatgaaatcaagccacacctcacctcatgccaaatgacaaaagcaaagtctcagtagtagaaataggagacctaaggcaaaccagtgccactgaaacagggtataaagatgtaaatgcttggttagaatgtattaaatattccatttgcactttaagcaaaagtgactgttatgcttgtgtgcacagtaggccagaggcccaggttgtcccctttccactaggatggtcctcaaatcaagtagacatggagtgcatggtagctctttctcaagattccaccgcctggaataatgaattgtgccaagctctttctctgctatttcctgaagttcaacatcctgcaggtcagcccccaagggccatccagcctccatcttccaaaaccaattttacctcgtttctccaatgacaaggggaaaaatttggcgttccttggagacttaacaggatgcagtgcagtcaggcacctccatgatctgacctatcagtccacccttatccatccccaagcagttgtatggtggtattatggagaacctttactggacactctgccaaataattagagtggtacttatgctctagttcagatggctaccctttttaccctggcatttcatcaaccagaaaaagaagaaaaagtagcctcaattcttacctctttaacagctatagtaagtatactccttaggtgctatgttgtaccatacatccagaagttaatcaaaacaactaagccaacacatattaagtgagtttgaagaggaaactataaagtgaaagaggaagaaattgtagaaagtagaaaagttcctcttcaaagcttatcttggtttaaaaataaaataatagacactaggaataatagctccttactctaaagcctcctatcaactattagttcttacagtttagcccagttagttgctttggcttactcaggcatgtctggacaggtccaggcaggtcttagctcatagcttatgccccttccttatttggaaatgtttttgcttccttaaacctttcgtaagcaacttcctctcattctctgttcttccctgcacttacctatttagggaagttttaggctattagcaaatcgggtatcagtttaagagtgtgaagtccagctccagccaatggatgcaggacccaacagtaaggacgacccaaatgtgtaagggataaatatgtcggcttttcctttgtttaggtgttctcttgccattgttccatctgtgattgagcaccctttctgcagaaagtaaagattgccttactgacagatcgaaagaaaggaaggaaggaaggaagaaaggaaagaaggaaggaaggaaggaaggaaataattcaccattctagatgccattaagaacatttgtgattcatgggaggaggtcaaaatatcaacattaacaggagtttgagagatttcaactctcatggatgactttgagagctttaagacttcagtagacaaaatagctgcagatatagtggaaatagcaagaaaactagaattataaatggagcctgcagatgtgactgaattgctgtaatctcatgataaaacttgaatgcatgacaaattttttctaatggataagcaaagaaaatagtttcttgatatggaatttacccccggtgaagacattagcattgttgaaatgacaacaaaggatttagattattacataaacttagttgataaagcagcaagtagggtttgaaagaattgactccaattttgaaagaagttctactgtagataaaatgctatcaaacagcatcacatgctacagagaaatccttcattaaaggaagagtcaacagatgcagcaaacttcattgttgtcttattttaagaaattgccacagcacacacccaccttcagcaaccacaaccctaatcagtcagtagccaacaacattaaggtacaaccctccaccagcaaaacaactatggcttgctgaaggcacagatgatcattagcattttttagcaataaagtgtttttaaattcaggtgtgtactttttttaggcaattaatctatggtacacttaagagactacagtttaagctattgagcacttaatagactacagtatagtataaacataactttttttttttttgagatggagtatcgctctgtctcccaggctggagtgcagtggcgcagtcttggctcactgcaacctctgctgcctaagttcaagtgattctcctgcctttgcctctggagtagctgggattacaggcgcgcaccaccatgcccagctaatttttgtatttttaatagagacggggttttgccatgttggccaggctggtctcgaactcctgacctcaggtgacccaagtgcctcagcctcccaaagtgctgggattacaggtgtgagccaccacacccagccataaacatagcttttatatgcactaacaaaccaaagcgaatttgtgtgactcactttattgcaatattcattttattgccattgtctggaactggacctctggtatctctaaggaatgcctgtcctgatatcaggaaagaaagtgggaacatcattacagacccagcaaacattaaaaggatgataggaaacattatgaacaactttatgccaatgaatttgcaaattacattaaatggataaattccttaaaagacacaaattaccaagtctaactcaaaagaaaataggaaaactagatatccttatatgtataaagaagtataattaataccactaaaaaaaagttccacaaacaaaacccctggcccagatagcattactaataaattctaccgaacatttaaggaagggataatttcaaatctacataaactctttgagaaagagaagaggaaggaacacttcccaactcattttatggggccagcattattttgatattaaatccagacaaagatatttcaataaaagaaaaccatacactaacaatcctcatgaacatagacccaaaaatctttaagttaattttaacaaattggttaagcagtacattaaaaagatgatatataaggatcaaatagagcttaatccagggatacaagggtggtttaacattcaaaaatcagagctgagcatggtggcacgtgcctataatccaagctaaggaggagattgaggtaagaggagtgcttgagcccaggagttcgaatccagcctgggaaacatagcaagaccacccccatctcttagaaaaaaagctatcaaaacaattcatcacattaagagaccaaaaaacaaaatcatatagctgtgacaaaattcaacactcatttctgatacaaaaattttttaaaaaacctctcaacacactaaaatttcttcaacccaataaagcacatctatgaacaacttacagctatacttacaatggtaaaaaatttaatgattccctccttataacaaggacaaggcaaggatatccactctcaccacttttattttacattgtactggaggtactagccaattaaataaagcaaggaaaaaaaaaagaaaactctgtattcacagactacatgatcttctgtgtagaaaatcctaaggaatctcaagaaaaaagttgaattcactaaaacaaatacataaatttagcaaggcttcaggatacaaaaatcaatacatggaagtcaattgtatttctacatactagcaaagaaatattggaagatgaaatttgtaaatgccatttacaataacatcacacacgtgaaatacttagcaacacatttaacaaagtatttgcaaatatctacaggctgaaaactatgaaatttgctaagaaatgaaagacctaaataataagaaagatcctttattgtttctgtcaaagactatatgaatgaatcaaaaaattcagtattgttagtccccaaattgacctacaaatccaacacaattccaatccaaatcccagtgaacttatttacagaaattgacaaactattctgaaatttgtgtggcatttcaaaggactcacaacagccaaaaccatgttgacaaaaaatagacatcaccaaaatataaaattctgctctttgaaagatactagtaaaagaaatgaaatgacagctatagactgggagaaaatatttatgatatatttaatgacaaaagacttgcattcggaccatataaagactcctacaactttataaaacaacccaattaaaaaaataatgggcatgccagaaaagaagatataggtatatccaataagcacatcgaaataggttcaattattcatcagattataattaatctgatcaattatttatcagataaataatcatcaatttttcatgcaaactgaagccacagtgagataaaaattaaacctactggaatgaataaaattaaaaagactgggagagtacagtggctcaagcctgtaatctcagcactttgggaggccaaggtgggcagatcagttcaggctgggagttcaagaccagtttggccaacatggcaaaaccctgtctctactaaaaatacaaaaattagctgggcgttgtggccatacctgtaatctcagctactgggtggctgaggcacgagaatcgcttgaacccgggaggtggagtttgcaatgagccaagatcacaccactgcactccagcctgggcaacaaagcaagactcgatctcacaagaaaaaaaaaatctgatattcattataattaaaaagaaaaaaacactgacaataccaagtgttgggaaagatgtggaaaaacttaaattctcttagattgctggtaggaatgatacaaccacttcaaaaacagtttgacaatttcttaaagagttaaatatacacttactatatgacctatcaatcagcaatttctctcctagattatatacctaagagaaatgaaatgaaagaaattacaacatataattaaaactaaaagacttatacatgactgttcttagcagcctcattcataatagctttaagttggagacaacccaaatgtccatcgacttgtggatgataagcaaattgtagtatattcacacaatggaatactactcagtgataaaagacaatgaaccactgatacaataccactgatgaatctcaaaaatactatgctaagtgaaagaaggcagaaccaaaggatgcgccattattttatttatatgaaattatagaaaaaggaaaagtaatttacaacaatagaaagcagatcagtggtttcctgggaccatgagtgaggggactgattaagaagggacataagtggccgggcacggtggttcacgcctgtaatcctagcactttggaggccaaggcaggtggattgcctgagcttaggagttcaagaccagtctgggcaacatggcaaacacccttctctactaaaaatacaaaaaattagccaggtatggtggcacgtgcctgtagtcccagttactcaggaagctgaggcaggaaaatcgattgaacccgggaggcagaggttgcagtgagccaagatcgtgccactaaactccagcctgggcgacagagctaggctctgtctccaaaaaaaaaaaaaaaaaaagagacataagggagcttctggggataatgaaaatgttctacagcttcactgtggtggtagttacatgagtgtatacattgtcaaaactcgttgaactatacacttaaaattggtacattttattgaatctatacttcactaaagttgatttaaaaagacaagaatggactgggcacagtggctcacacttgtgagggcaatgtagtgagaccccctctctacaaaaaataaacaaaaattacctgggtatcgtggtgcatgcctgtagtcctatctactcaggagtcagaggcaagagcatcacttgaagctaggagttcaagacctgcctgggcaacatagtgagacctggtctctacaaaaataaataaataaataaataaaattaaaaataaataaataaataaataaaagttagctgagtgtagtggcatggtacctgtagtcccagctattcaggaggctgaggcaggaggatagcttgagcccagaagttagaggttacagtgagctatgatcatgccactacattctagcctgggcaacagtgtgaaaccttgtctcaaagaaaacaaaaacaaaaatgaacaaactaatctataatgataaatatcagaataatcaccacctttggaggaattattgactaagaaatagtaagggagccttctggcagtgatgaaaatgtgctatgtctttatctgagtggcaaacattcagtgagctaaacacttaagatttgcatacctcattgcatatttgttgctccttaatgaaaattttcttaaaaataatcacttatggttgcttgggttgaagtgcctattaaagaaaaaagcttttgctgcatttggccataattacaatagtgatgacccctggggttatcagtgggtgggcttcatctcacagtattagagaggttatagaaagtaaaagacaagctcaggactttaaactctcagctcaaattgcagtcagaaaacctgatcattatatagaaatctctatttcttgtagcttcagggcagatacggatgaaaaatcagcccccaaatataatgtgacagaatcaagatgtaagttgaattcacagacttgccaagtcttttacattaaagttagcacattggaaaatagatgagaccctgaaatttggaatagttacatttgggtggactcagaggaatctgagacttgagccacaaatcttcccaagctttccttggcaggagaagcaaccccttctctcctgtctgagaatattagcttttctttccttagagatcctttaataacttctcttggggcatttagcttgcaaggaggtgtctattttcttcaagatccacctgtacaacattcattgcctttaaatccaaaattggagtctgatcttggtattgctccaggaatactagttcaaagtctgtcttgagagatgagtgttggtactccaagagatcagtaagtttttgctaatttctagcagcagaaagctggggaatatgtgtgggaattgattatagtactttcagactaagaaggatagatataactttggattgcctcaaatttatcagtattgctatactttgcagtatatacttagcagtaacatttttgatatctgggaatagttttaacaattttcttggtagattaaataaaaccttgactcaaagatagcctgcattcaatgaggttgagatgccggaatcttcttggcttactatacagtaagaaatctaaaggctttcaagatttctgaaattgatttttcatatgtagcctctatatgtgcacttctaccatatcgcccaggacagcccaaatgacattcccttgagaaataactaaagaaattaacgaggggagcaccaatatcactaaaaagttctatggttgctgtcctggggatgatggtgagagatactgtcattgaagtaaactctctaatttcaagggaaatgattggcttctagagtgacaaaagatatatgacatttaactaccagagacaagtcccactagtcaaagttagtgctcataagtataattaataatagtattttgatccaatctcaaagatccaaggccatattttaacggatccagtttgtctaggactcacactgtggttagttcctgaatatatacttggaattaccataatgaacagtgggagttaaagtggccatctaaatgttttcttggtgattacagtttccttaggaattaaatggatataatgcctactaaattattactggatctacttacagaaaagcactaactataggtccagaaacatgagttgagataccacaatggagaatctcagcctctcacccagatgccagacttaagtcagttggtatacccagaactctttggttgaagggaaggctgggtctcttggggaagaattcgacaagacttcctcaagtacatattgtagattttactctaggctttactcaaagggcctgtagccatttattagggtaaatatgcattggcaaaggaaatatcacagactcagggattaccagatattgattccaagttaacatcaattcctaggatcccaaaacactcccgtggaccactgggtaaagttaggatgtatagatgtcagataataaatgctattttggtcaaagtttatgtcataggtccaattactctgtggacttagctatggttatttctggttcttggatgtttaattggaatagacacacagcaaccagcagaatcttcacatttgttctccattttgggaactgaggactattatggtaggaaggacctggtattatggtaacagaaactcctgaactttccctgtctgccagaatgttaaaaaaaaaaatacataatcatataacaaaaacaaaaaactccacagagatagatatgaaaatatataaacgattcaggggaagtaatcctatcatattcttatctaattttcctgttttgtctatgtagaaggtggaggatacttcttttttttttttttcttttgtgagacagagtctcaccctgtcacccaggctggagtacagtgtcatgatctcagctcactgcaacatccacctcctgggttcgagcgattctcctacctcagcctcccaagtagttaggacacgtgccaccatgcctggctaatttttatatttttagtagagatggggtttcactgtgttggccaggctgctcttaaactcctgacctcaggtgatccgcctaccccagcatcccaaagtgctgggattacaggcatgagctgctgcgcccagcctacatcttgaagaatgtagattactgtggctctatttacatggctattccaggtgtggaatctttattgaatcaaattgacgtagctctctcattcacaacaactattggtctggcaaatgctgttttctctagagaagtttacaaggaccaaaagaaatttgatttcacctgtcaagaatagcaatacttttcactgcattctcttagggctaaggcagttcttcttttctctatcgtaatctagtatacatagaccttgattgtattgacatcacagaacaggtccatgatatccatcatgatgattggacttgatgagctgaaagcagcattagataccttggtaaagtagcattagataccttggtaagacagctaatgtgtgtcagaggatgggagataagccccataaaaatacagggtttatgaccttgttaaaatttttgctttgggaggctgaggtgggcggatcacgaggtcaagagactgagactaccctggccaacatggtgaaaccctgtctctactaaaaatacaaaaattagccaggcgtggtggcatgcgcctgtagtcccagctactccggaggctgaggcaggagaattgcttgaacccgggaggcggaggttgcagtgagccgagatcatgccactgcactccagcctgggcgacagagcgagactgtgtctcaaaacaaaaacaaaaacaaaaacaaacaaaaaaaaaacaaaagaaataggcaactggtcccaactgaaaaatgggaaaaagatctgaaaaatccattcacagaagaggaaaaacccatacatataataagcacatgaaaatatattaaatctcactagtaatcagggaaatgcaaattaaaataatgataccatttttatctatcagattacaaaaaataataaactctaacaatatcaagtattgatgtggatatgaagaaataacactgtcattcaatgctggcaagaatgtaaattggtatgaacattttgtgaagcaatttggctataactaataaagttgaaatgcatacattatgcaatccagtaattccacttctagttatttatcctagagaaacgtttgcatatgtacacaggagacgtgtataaggatatccattgcagcattacgttgatatcaaaatactgaaaataatcaaaacaccatcaatagaggagtttttttttaattatggtgtttccatattacagaatgccttattgcagttaaaaagtataaaatatatttctttacagatatgaattagatctcaatgttgagtaaataaaagcaatttgaagaaagacatacgtactgtatcaggtacttttttttcttttttttttttagatggaattttgctcttgttgcctaggctggagtgcaatggcatgatctctgttcaccgcaacctccgcctcctgggttcaagtgattctcctgcctcagcctcccgagtagctgggattacaggtgcccaccaacatgcccagctaatttttgtctttttagtagagacagggtttctctgcgttggtcaggctggtctcgaactcccgaccttaggtgatccacccacctcggcctcccaaagtgctgggattacaggcgtgagccaccgcgcctggcctatatcaggtttttttgtttttgtttttgagacaaggtcttgctctgtcagccaggctggactgcagtgacatgatcatagctcactgcaaatcaacatatcctctggcctcagcctctggagtggctaggactacaggtgtacaccaccatgcctggctaattttttattttttgaagcaatggaggtctcactgtgttgctatatcaggctttttaaagcacatacacaaaatgttaacaatcattatttctgggtgttgggaacacatatgttaattctatcattttctatatttttctataatcaaaaaaattttttaaaaataacaatggaaaaaggacaagtagggagcggtaaattgtttcaagtgacatactcaggtcaggtaagataagtactgaacattatacattggatttagccatcaataagtcagtcacaaatatttcttaaacatttactaagtagaggtcattttgacacgtcacagaatgggaaagtagagtataagcctaaaggcaagatataactttcttgattttgatgctgcagcttttatttacatgataatgattgttgtggtgatagtgatgataaaagcttcaataagccacgttccaactgcataaaaatcttaaatctcctgtaacaactaatcacaaactttcttctttgcttaggtagggtttttggatcggcagaggacattggccctgctggaattgttctatgaccatagttcacaaatgcttaggagtttacttcgaaacccacgacaatgtaagtgccgctcagagggagtatgttcaagctggagtgtcgcagtgcactgatatgtactgatatgatacactgatatgttaacacaagattattctaccaccatggaatcccttcacataatagctctcttagatcatgataactgtatctagttgtttattccctccacgaaattcactcttcatcacaactagatgtatttttcaccacagtgcaatactcaaaaattttatatcagaactcagctagaactcaattctaaattcattcaaatgaagaaatgctttagtgacagtctgaatgttttggaaattaagttagtaatggtaattccattttattaacaaaaaaatttttttgagtcttactcttctcacccaggctggagtgcagtggcatgatcatgactcactgcagcctcaacctcccaggtgggagatgattctcccacctcagccacctgagtagctgggactacaggtgtgcaccaccatgcccagctaattttttgtatttttaatagagagaaggtttcaccctgttgccaaggatagtctcaaatgcctgggtgctgggattgtaggtgtaagccaccgtacccagcctggtaattccatttttaatgcccaacttaaaattataagatgtataagaacagtatttccttttcccaagcatttacttatacagtaaaatatcctttttatgttatttccaaaacaagtacaattatggggtttatttttatttttttttattttatgttattttacgttttcagagatggggtcttgctatgttgcccagactggcttcaaactcctgggctccagcaatcctcctgcctcagcctccagagtagccaggactacagggatgtgccactgtggtcagtttattttcattttttttaaagagaaggtattgtactggctgagtttcccaaagaatgtcttttttttgagacagagtctcgctctgttgccgaggctggagtacaatggcgcgatctcagctcactgcaacttctgcctcccaggttcaagcgattccccctgcctcatcctcccaagtgtctgggattacaggcgcctgccaccacacccagctatttttttgtatttttagtagagacggggttttgccatgttgggcaggcaggtctcaaactcctgacctcaggcatccacctgccttggcttcccaaagtgctgggattacaggcattgagccaccacacctggccaagaatgtcaatattttatttctgtgtgaagatttattaattggatacttacaaatctgtgggtgatatacttggagtatttctgaaaattgtgagaattgcaattttatggcttaccactactgttttgggagaaatggggacagtcttgtggcatgatttccactctttatagtacagacaccagggttttattgttgttgtttaacagtgggattctgtgaatactatccagtctttccctagtattctgttctaggtatccacataactgtagaggaaaataattgaggaatgaagaacaaagaagagggaaagagatagggggaagaaatgaatgttggaaaaacatagccccattgaaagattgtcatggataaagacttgctttttatattgcaaatattgaaaatatatttgacatgaaagatgtgtcccttttcccatccctatgtgatgcttattgtaggagaccacaaaggtagaggacaaattctatttgccttggcagtctaagcaacactccaagtagcaaaaggagaatcctatttatttccaaaatcacaccttttaggaagggatgatttctaacttacagtagtataagttcttttgggtacctttttactttttattgtgttgcagccaaagataactgatatttatttagagcaataggcctatattacaatttctgtgctcaatgcttttctttgcattaatttaatagctctaattctgcattataagatcaatggtttaagtgaatattttgttttctgcattagggccattcattgaatttgaagagataaacttgactgagttgtggggagacatggataatcagaaacacatttatgaaggttttgacaaagtgctcttggagatgaatacattactttctgcaaatcatgctagcaaaacccaaagtaaattattagaaagtccagatcaacctaaacttaacgaacagagaacatcaacaccatcaccaaacccgccagaacagcagagaggagtaactgcagaacaaggaccacaaagaatttcaattgaagaacaacaacaaggcaaaaagccaactgcagagcaagaactgtacatagaatcagtaatagaaccaggaacacacacagagtcaactctagaacaagggtcaagtagaaggttactgacagaacaagaaacacacagagagtcaactacagaacaaggacagcacaaagggtcaatagaaggacaaggaccacgcagagtgtcagtttcagaacaaggatcaagcagagagtcagttgcagaacaagggtcacgcagagagtctattgcagaacaagatcgacacaaagggtcagtagcagaacaaggatcacgcagaatgtcagctgcagaacagggatcactcagagagtcagtaatagaagaaccataccaaaaatcagaacaaggaccttatggagagataatttcagaagagcaagaagacataggctcaacttcacaatcaagaaaagatagtatcttaaaaagtacaaaatatggggaacctataacctctgagtacattgaagtccctctacaggaaaagaggtcttgggaacaaacatatgaagaggaaatattcctgagttctgaactgcaagaggaagttccaaccttaagcagaaaagatcactttccaggtagtaatgcagttcttctacaacatcagttccctgttttgtggaatggtttttaaagtcttttcagaaaacactcatttaagttagaattttttttctggcatatcagatcatgcaaacctcaggcatattttgctgctccacattagtctagaccttgaacaataatcaattaattacattcactaatgaaatgcaagccagaatgtctgtattgtcaatttacatataatttccattgcactagattatagaagtgttttaattgggtttctgaaaaggtagtagaagcccttttgttttaaatgtaatgtctgatattagaaaccactttaaaaattttcttttatttcaactgtaaatgggtctcgcttttttcagttaaatataaaatatatgttctagaagagtttctgaaagtcatattcaagacagaacgcaccctgcatttcaaatatttattctcatgtctttggtcagaatttaggcatacagtagttcccccttatccatggttttgctttccacagtttcagttaaccacaatcaaccacagtcagaaagtattacatggaaaattctagaaataaacaattcatacatttttaactgtgcaccattctgagtagtgtaatgaaatcttgcaccttttgttcagtatgtccatgttgtctatgttaccttctcattagtcacttaatagctgctggattatcagattgtcattatgttgcagtactcttgttcaagtaacctttattttacctaataatggcttcagtcgcaatagtaatggtgctggcaatttggatatgccaaagagaagccataaaatgctacctttgaagtgaaaaggtgaaaattctcagctgggcatggtggctcatgcctgtaatcccagcactttgagaggctgagacgggtggatcgcttgagcccaggagttcaaaaccagcctgagcaacatggcgaaacgccatctcaaaaaaaaaaattagctggccatggtggcatgcaattgtagtctcggctacgcaggaggctgaggtgggaggatcacctgaacctcaggaggttgagcctgcaataagccatgattgcaccactgcactccatctagcctaagcaacaaagtgagaccctatcaagaaagaaagaaagaagagagagagagaggaaggaaggaaggaaggaaggaaggaaggaaggaaggaaggaaggaaggaaggaaggaaggttcgttctcaacttagtaaggaaagaaagaaaattgtattctgaggttgttaaaatttacagtaagaacaaatcttttacttattaaattgtgaagaaggaaaaagaaattcatgctactttttctgtcacacctcaaactgcagaagtatatgtactatctgcagtttcaggcatccactagggatcttggaacatatcctgccaaggttaaaaagggggctattgtatagtaatacctagctgtgagggtggctgagaaatgtagcctcattttgcatggccaaattggatacaataacagcttttgctatagagctgctttcaacaattcaagttattcagtgacttcactgtggtcgattgcaacactgcatatatgggaaagtacttagagtttttggtgttctatatgcaatgcatttctatcacttattaaccttaaaatagctaatggaatatgtaatgtctaattcataagcattttcatttgcaccttttagaaactacaaaaaaggaagttcagaaagacaagccctgtgaacccaagtcccaaaaaatagaaggaaagtcatggtcaggtaactcctcatttaatcctcctttcatttataccctagaacaaaaatattgtgaaagcgaagtttgattggctatgttatggaatgtgtttttacaggtgaattttttacttgtaactggaaaatgaagtatgtcacatttgaagatgaggaacaggcaaacttaatctatggtaactccaggttcacaggtacatgttaacaatgaaagtaggaatagatggcagtccaatagatggatttaatttactgtggtactcgatgataaagactgaatttagctaaggcagaatgggaaggtgttccttgcattattttgtccttgagctggtgaatctaaatatataccagatagatatatttggtggtgatgtactattgatggtggcatgtgctattgatgaatgctcttctgctttaaaacttatggcattagtacccattttttaaccatgatatggccctaccactgctttaaagctatgatctaagcatacagagaaaatcagacattagatactaaaactcaatagaaatcatttcagctattcctttacctggtagggccacatctaaacatatgagacaagtgagaatctatcttgtttttgaagacttgcaaagaaagatctactcaacagagcagagtagtttctggctttcagacaaagcatgtctttaaaatgattgttccaaaagcactcatatttcactaaaatgctactatattgttttgcctttcacatcaacaagttgtagaactaaattagatcaagattatcttcttcctacctgcaaatttttctctcatttaagcctcaaataacaaactttctatcctcaaattttctggtgaaaatgcatggcattggtcaacctcttgcagcctgctagttcatgttcttcttcttagtcatctttatatcaattttgctttaccaatatatgtaaaaattgtgagtaatcattttttttaatcacatcaaatctcatatagaaggtataagggcatgaatgattgaatcaatgaataaatcaaacggaagtcactttgctgacattttatgaaatatacttcatactgtactattgagctaaaaggtaaatatattagccaaggcttttggaagaaggagttgtggtggtggtatttagtaatttgtttaactagaaagttcagcgtgcagctgttttcaggcacaactagattcaaaggctcaacaatagcagcaggatactgtctgtcttcctctaagccctgtttttctgtgtcactttcaattgagacagttttctccatgttgtgacaaaaatggccatgaaagcatctctaagcttatactctactagttcagcaatcagagtacaaaaagagtgattcgtccctaatagttcttccaaaagttctgaggctaactctcattggcctatagtaggttacattgctatcatatatgaattgttagccagatgtatatcacatgaccatccatggcacaaaagtgggaggcacagtatgacctgactcatctgaactgacaatggagagatgtttttccaaagaaaaaaggaggatgctgtcctcatgaaggaagcatggattcctgacagtcaaaaatggcagatattcattacaataggcactcatttattttccctaactgaaaaaattgttcactttactgcttggtaatgtttcttgcttgacagatttacactcaattatcagaaatattcagtcttgcaaggaggtaaaaggcagaactgccttcaatggagtttcattcaatctgctccagtttgtgcaactcctggagacatttgttggtgaagacgctcccttgagtgtcagcgagactctcacctccttttttaaggagggctatgttgaaacagaacaagagaaaatgaatgccttagaacaggtgggtaatattatttattaatgatacaagtgaggtcactattataagtaaatctctcaacctcagttgctcccgatgtggctcgtgttaaaaaatgtacaaccaaactgatcactttctttcaacaagcatagccattaaagattctattttatcatcaaatattctaagatcacactccagagaactcattcccctaataataacatgattgctcctagcaggagatggtttattgtacagctttattctttctctgaagctttttgagaagcagatatggatatatgcaaagatgtgtatgtgcattatttgcctgtgtgtgagtgtctttacaagtacacacacctggggtatgattatggcctgagtatatatttttactcatgagcacccaggtagtacatatttcctaagaacttactacttacttgggtgacaggtaagtgcatacacattagcttatataaacaatttattctctcatatgaaatatgtaaattactttcactaagcttattcagtaatcatcagccttatgagtcttttcaacctaattctagacaattccctttaccttctcaattccagttcttcctactaaatcaaaaggtgtatattcattttatttttgcaattatatctatctagatattaattcaattactatctcactaatataattaacctagtgaaaactctaaaagataaataaaattaatgtcaaatatagtcaatcttaaatataaaaaaagaatttttaaaacacagccatttttcattatttaaacactgccattcattccccttcactcaaaacatatcccttagggccagctgcagtggcttatgcttgtaattccagtgctttgggaggctgaggagggaaaatctcttgggctcaggaatttgaagttacagtgaactgtaattatgccactctattccatcctgggtgacatagcaagactctgtctctaaataaaaataataataattttaaaatacagtctgtgtatttatcacattcctgaacaactagagaaggagtggaaaagaatggtcaaagattcttaaggtttgtagaataaatttgaaaaaaaaaaaaaaggattcttaaggaatactaatgcagagaatgcctgctgttattttttttcttcaaagccagtcaaggttagcagtgggaggttgtataccaactttagtgacactaatgttaataagttctgataaccccctaccatgggaccaaccaagaatgtctgttttgttttgtttttgtttttgtttttgttctggcctagaagtaaaacagagaaatggtatttaagggattaaaattaatcactgcattttcttttctaaaaatttttaaaaaaaattttttttaagactgaggtctcactgtgttgctcaggctggtctccaactcccggcctcaagcgatactcctgcctcagcctcttgagtggctggctttacagggatgcaccactgctgaatcactgcattttcccttaatatcatgcttagcctcaaagtaaacctgttttaatagaagacgctggactttttttggaataaacacagaatgctagctagcacaatgaacatatatcttccgtgctttattatcctgtttgtatcctagtttagccaaaatgctttccaagtccgacagaggcttctcctagaagccatctttcagaagtgggacagtgatggctcaggcttcctggatctgaaggaagttgatgaactcttgtacacatacaaggagggaatggaaaaagaatctatgaagaaaggtaaaatataagaatgttcttatttaaactgtggtaattaacttggcttcaagtttctcagtacacatatacagttaaaatactggttatgctaaaaccactagataacccttcatgtctaccagtatagatatacatttatcttatttatttttaatttctaaaaatagagataggagtctcactgtgctgcccaggctgggctctaattcctgggatccagtgatcctcctacctcagcctcctgagcagctgtgactgcagtacctgccactgtgcccaactctggctataatcttttaagtagaaaataacaagtgttggcaaggatgtgaaaatattagaagccttgtgcatttgtcaacacagtcagaagtggaatatgttgcagaatgctttgtccaaaatcttaaatctatatagttagattccttcagtatacctggctactctcactatgtaactaacctgcacaatgtgcacatgtaccctaaaacttaaagtataataataacaaaaaaaataaaaaaaaatttaaaaaaaaggttaaaaggattcaagccattccacagttctgcttgttctctcttcttgttttatctctttgtcttcactggcttgcaaatttcttcttcaatttactaacttcttattctccttagtgactttttgtgtattatatttttctcttatgaccagtatttaccagtcaaaagccactaaaattctcattccagtatgataaattcctttcttcattttattagatcttagtttaaattatttttctcttcactgggtttaaagatttatctggttaactttggtgtaccagattttcagtttttaaagtatatagtgcacaagggaaagaattgtcaaggttagttaagttcttcagccctttcaaaaatcattgtattggttgagcgtcaaatgttcctaagtttattgattgtcatgttctcttcagtaactatgtcttctacaaactttacattatactacctggcatgtcttaggatacatccaatgagaatttacttaatgaaattccaaaaggcataatgatgtgattttcacttatcaaatgggcaaatttcgtaacacaaaaccacatcctacagagaacactagacagtagttatagcagctgggttccaatactggatcttcactaaatgatcttgtgatctttggcaagttccttaacttccatagacccaggtctccttgttttcaaaacgaaggctttagatatgaagaatcctagaatttaaggaacctaagggtaatgttataaggaagtcccatatattagatgatatggaatccaattatgtggaattatatgggatcatatatatgagtaaggtatagcaatagggacagatagatagcataaaatgtgaaggattaagcccagcaaatgagaaccaggacagcaatgaggaggcagaatctgctgccagataaaaatgtctgcaaacaagaacaattattctctccaagggcaggcttatacaaaacgactctcaataaacacatattggtagccatttggtctgaggagatgattgctgagctgatggcagtatggaagaaaaaaagcagatttatgctctttaaaaaggaagaagattctaaatttcaagcattgccaataaccgattggcaaatcttcaaacagctcttttgtttgtttgcttgttttggtctactcctattgcttctttgtccaagatttaaaattgggatttaaatagcttaaaatcataggattagaagtttttagaaaggtttctgctggtgtcctcaaaatggaagatttctatatggaagaggaaggttgaaacttttagtctgtcttccccctccccaccttttttttagagacaaggtctcactctgttgccaaggctggaacgcagtggcataatcatggctcactccagcctctatcttccaggctcaaatgatcctcccatctcagcctcccaagtagctaagactatataggctgtgccaccatgcctggctaattatttttaagacagggtctcactatgttgcccaggctagtcttgaagtcctgggctcaagagatcctcctgcctcagtctcccaaagttctgggattacaggtgtgagccactgtacccagcctcatttccccttttattcctgtctaatacagcctaatcttttgggcagaaacatcacaaataaaaagctatagaacatgtggcctgtctgcattgttgaatttaatggaataagccattttttccccattacttttcataggatagctattaacattcttggctatgccttttaattttctatttaaatgacgaaatttgctttaatatgttcatttatattccagtaggacatttaactcttttataattaaaacattttggaaacatttattttggtgacatcagcaagatggccaactagaagctcttagggcctgtttccctcacaaagacaagccagaacaacaaataaacaattacattaagaaaaataactgagggagagtgccatcttgcatcagaggagtagcagaaatcctggtgagcccagaaactcaagatggccacatagagaacagaaggcgatgccaggtctccactaccccatcccccaaccaggatcaggtgggaactgggaagaacttctacctatgaagtggaagtaagcaagaggatcccagcaacccccattgacaccttggacacctacacagctcactactggggtcccctgcagtcctcacaggcattaagcccagctgagggagctgcctctagaccacatacctgtgctctccccagaaaagacgctgacatagtgccctgacccttgtggcccgtgtggctactgcactacaccagcttgggattggaactacggctggagtgtgtcttgctcaggggtgagtagtcacgacaccccttcatccctggggctaagccaccaccaaatcacctcaggccagtggcccagcatcctcaagtggagctgcaagcactcttccacatgaggccaagtggaggtggagtcactccatctaccgctcccttcattcccttgggccaaagctgaggcagtactctgcctcctagaaaaacaattccttggccactcaaagcagtcattcctcctcagtgcctaagttgaagaaactccctgcatcccaagaaatggtgccttggccactcagaacagtcacacccccagccctgagctgaagcagcacattgccctctgggaattggtaccctggccaaactgagctgctacacatcccagtgctgagttgacgtagtaacctgtgtcccaaggaaacagagcattggctgagctaaggaactctgccctacagtccaaacaactctagtacctggcttctctggagctttactggactcttagagtctgagtggctgaaatacccatctccctgggaagtggagtcactgctattcttttccttgtactccctaaggcccaaacaacagctgtgctctgcctttctgggttacttgctgccaccgtacctggtcttatagtgtcttggataatgctgagccccaccattccatggtcttgtgtcactactacacagtgcctcatgccctgagacctgagttgcctttgagttttatttgcttaggttcccatattgcaaccatatcgtcctcctgggcccaaacttccagagcaagttttctctctggagtcaggccagtgctgtgccctgccccccaggggtagaatcacagctacagcccagcctcctgggctcaagctgctagggggtgcctcagagtcacagatcctgtctctatgggcaacctacacccaaccctgccacagaaagcaaacctgcaccccaagaatcaggagccacagtaagtttgggagatcctgtgcttaggaccctaacccgacacctgccctgagcacctgcaactggaacccagtgccactgcagctgcttataggccatgtcagacctgacaccaagagggatccccctcagctaagtttccccattgtggggaaaacaagagtaagaggactccaaaagccctcaacatcaaggacattaataacatatgccgctgctgctgctgccacaaactttctactgcctaggccactgaggtgctgacaggtattgctgatgttgaacacagctgaagaaactgcacagagactataccatttcacctatctggaaacaatgtcgccatgtccatcccaactagcacacaaaatttcaactacaggtgaaaatcttcctctataaaagccactctagaaagattggaagagacaattgttccaccaaataaacagacatcaatgcagggacacaagaaacatgataaagcaaggaaatatggcactaccaaaggaatataactctctagtaacagacactgaagaaaaggaaattaattaattgccaggaaaggaatttaaaataatgatcttaaggaaactcaacaagacaagaaaattcagattgacagttcaacaaaatcaggaaaacaagtcctcatatgaatgagaaattcaacaaagggatagaaatcataaaaaagaagcagacagaaaccctgcagctgaagaattcaatgaatgaaataaaaatacaatagagagcttcaccagcagacttattaatcaagcagaaaaactaatctctgaacttgaagataggccatttaaaattacccagtcagagaaagaaaaaagaaataagaatgaaaaagagtgaagaaagcctacaattatcactattaagtgaacaaatatttgtattatgggacttccagaaggagaagagaagggaaaagatgttgaaaacctatttaacaaaataatagctggaaatttcccaagtctggggagatatatggacgtccagatccaggaagctcaaaatttcccaaatagatacagcctaaaattcctctccaaggcaaattaaagtcaaactgtcaaaagtcaaagacaaagagagaactctaaaaacagctagagaaaagtatcatataagggaaagccagagaaaagtcacatagaagggaatcaccattagactaacagtggagtccccattagaatagcaacagattttgttgcagaaatcttaaaggccagaacagaatggggtgatatattcaaagtgctgaaagaaaaaaaaattaccaaccaagaatagtatacccagaaaaactatccttcagaaatgagagaacaataaagtctttcacagataagcaaaaacttgagggaaattatcaccactaaaccggccttacaagaaatgctcaagggagccctatatctggaagtgaaaatatgataatccctatcatgaaaacatgcaaaaatatgaaactcactggtagagcagatacacaaaggagaaagaaaagaatcaaatcttatcaccaaagaaaaccaacacactgcaataataataagaggggaagaaaggaacaaaggatatagaaagcaaccagaaaacaattaacaaaatgacaggagtaagtactcacctatcaataatagctttgaatataaatggattaaatcccccatttaaaagatatagattagctcaataaattaaaaacatgacctaactggccaggcgcggtggctcatgcctgtaatcccagcatttcgggagctgaggcaggcggatcacaaagtcaagagattgaaaccatcctggccaaaatggtgaaaccccatctctactaaaaatacaaaaattagctgggtgtggtggcatgcgcctgtagtcccagctactcaggaggctgacgtgggagaattgcttgaaccctggaggtggaggttgcagtcagccgagattgcaccattgcactccagcctgggcgacagagccagattctgtctcaaaaaagaaagaaagaaagaaaaaaacatgacctaactatatgctgcctagaagaaactcggttcaccagtaaagacatatatagactgaaagtgaagggatggaaaaagatatttcacgtgaatggaaattgaaagcaagcaggagtagctatacttagacaaaacagactttaagtcaaaactgtaaaaagagaaaaaggtcattatataatgataaagagatcaattcagcaagtgaacaattctaaacatatatgcacccaacgtcagagcactctgatattataaagcaaatattgttagatctaaagggagagatagactctaatacaatagtagttggggacttcaacaccttactctcagcatgggacagatcatttagacagaaaatcaataaagaaacattggatttaaactaaacattagaccaaatggacctaacagatatttatagaacattttatccaacagctagctgcagaatacacctcttttttttcagcccatggaacattctccaggatagaccacatgctaagtcacaaaacaaatcttatcaaatttaaaggaattgaaatcatatcaaatatcttttctgacctcaatgaaataaaaatagaaatcagtaacaagaggaactttagaagttaaacaacatgctcccgaatgagcagtgggtcaatgaagaaattaagaagggaatttaaaattttttttgaatttttactttttactttttaatttatttattttttaaattttcttctactgaggtcctatgccatcataaaatttcttggaacaaatgaaaatagaaacagaacatactaaaacctatggaatacagaaaaagcagtattgaaagagaagtttatagaaataaatgctcacatcaaaattgtagaaagctttcaaataaacgatctaacaatgcatctcaaggaatttggaaatcaagaataaaccagacccaaaactggtagaaaaaaagaaataataaagatcaaagcacaaataaatacaattgagaccaaaaaataaccaaaaaatcaacaaaacaaaaagttggttttgtaaaagataaaccatattgccaaaccattagctagactaaccaagaaaaaaaaagacccaaatgaataaaattagaaatgaaaaaggagacattacaactgataccacagcaatacacagaatcattagtgactattacaaactatatgccaacataatagaaaacctagcagaaatggataaattcctggacacatacagcctaccaagattgaagcaaaaagaaatagaaaacctgaacagaccaatcacaattaacacgatttaatctgtaataaaatgtctctcatcaaagaaaagcccaggatctgatggctccactgtggctttctaccaaatatttaaagattatctgatatcagttcttctcaaactcttttagaaaattgaagaggagggaattcttccaaactcattctatgaggccagcattatgctaatactaacaccagacaagaacacaacaacaacagaaacagaaattataagccggtatccctaatgaacacaaatgtaagaattctcaacaaaattctagcaaactgaatccagcaacacattaaaaagatcattcacacagagaataaaagaaaggctgggtgtggcggcctttacctctaatcccagcactttggggggccagggcaggaggctcacttgagcccaatagtttgagactagtctgggcaacataacaagaccctgtctctatttaaaaaataataataataataaggaaataaaagatcattcaccctgatcaactgagatttatcccaataatgcaaagatgatttaacataaaataaccatgatacatcccatcaacagaatagacaaaaaattacatgactatctcaatagatgcaggaaaagcatttgataaatattcaatattccttcatgataaaaactctcaacaagttaggtttagaaggaaaatacctcaacacaagaaaggccatacataacaaaggcaacatcatactaaatgggcaaaagttgaaatctttttttctaagatctggaatgagacaaagataaccactttcaccacttttactcaacatctgtctattctagatgtcttagccagagcagttaggaaagagacagaaataaagggcatccaaattggaaaagagaaagtcaaattgtccctgtttgcagatgacatgatcttatatattaaaaaaccctaaaagctccaccaaaaaattattaaaacggataaacgaattcagtaaagttgcaggatacaaaatcaacatataaaaatcagtaggccgggcgcggtggctcacgcctgtaatcccaggactttgggaggcggaggcgggtggatcaccagttcaggagatcaagaccatcctggctaacacggtgaaaccccgtctctactaaaaatacaaaaattagcagggcgtggtggcacgcttgtagccccagctactcgggaggctgaggcaggagaatggtgtgaacccaggaggcggagcttgcagtgagctgagatggcgccactgcactccggcctgggcaacagagtgagactccatctcaaaaaaagaaaaaaaaaaaatcagtagcatttctatacactagcaattaactagaggaaaaagaaatttaaaaagtaaccccatttacagtagctacaaaaataaaaaataaaatacataggaataaatataaccagggaggtgaaagacgtctacaaggaaaactataaaacgttgatgaaagaaaatgaagaggacaccaaaaaatggaaagacatctcatgttcatggattggaagaattaatattgtgaaaatgaccatactaccgctgtcaccagctgctgacatgggcaggtcccttgtggggctgcctgtgcgggtcgctagggcggtggacatcacgctgctattccgggccagcgtcaagaccgtgaagacgcagaacaaggcactgggagtggcagtgggtggcagagtcgatggcagccgggatgagctgttccgcaggagtccctggcccaagggcaacttctccagccgggcccgcgaaatgatttctcacagtggcaaactgagagattttcttctggaacacaggaaagattatattaatgcttatagccataccatgtctgaatatgggaggatgacagacacagaacgagaccaaatagaccaggatgtccagatattcatgaggacctgttcagaagcaattcaacaactacgaacagaagctcacaaggagatacattcccagcaagtgaaggagcacaggactgctgttctggatttcattgaagattacttaaaaaaagtgtgtaaactttactcagaacaaagagccatccgagttaaaagagtggtggataagaaaagaatatctaagctggaaccagaaccaaatgcaaagacaagagaatccacatcttctgagaaagtttcacagtgtccttcaaaagactgaagaaaaccctgccactgaagaacatccagaaaagattttgactgaaagacaacctgaattgggaacatggggagatggcaaaggtgaagatgagttatccccagaagaaatacaaatgtttgaacaggaaaatcagcgactaattggtgaaatgaacagcttgtttgatgaagtgaggcagatcaaagggagagtggttgagatttccagacttcaagagatattcacggaaaaggttttgcaacaggaagctgagattgatggcgttcaccagttagttgtgggggcaactgaaaatatcaaggaaggcaacgaagacataagagaggccattaaaaacaacgctggcttccgcgtatggatcctcttcttcctcgtgatgtgctccttctccttgctcttcctcgactggtaccacagctagcctgggccacgggggcccagcacgagagtctgcatgggcgctcacaggctgtgtactctcatgtacccgccgtagtctcatgtacccccggtgctggagcatggtatgaccacattttatcacagagccattttaagagaaaggggttcagacagacggacatattccccaaaaagggatacccaggccgatagtgttcagcccatttcgcagctgaaaaagaaaacactgcacaccaatgggaagtggcctatgtagctatcataaggctagacaaactgaatgctggagctggtgattagctgctcctgaacttgaggccgccttggcagggggggctgctccagtagcaggggcacagcaggcctccagagcccccagttgtctcagggttcaaaggaagtcactgacctttcccatcccagtagcttcagggaagaacatagtttaataacgtctctcaacaaatgattacttctttgtttccttgtggcttcttgtctgtctgagtcaaccaataaacagactcactggattatagaaaagaaaattcacatttgccttattaatctaataaatacaattacagccccttaaaaaaaaagaagaaaaagaaaatgaaaaatgaccatactaccaaaagcaatctacagtttccatacaatcctgatcaaataccaatagcatttttcatagaaataaaaaaaaattctaaaattcatatggtatcacaaaatgccatggatagccaaaataatcctgaacaaaaagaacaaagaggcatcacactatcagactttaaaatatactacaaatgtctagttaccaaaacagcatggtactggcataaaaacacatagaccaatggaacagaatagagaacccagaaagaaatccatatatttacagccaactgattttcaacaaaggtaccaagaacattcattggggaagggagagttacttcaacaaataatgctggggaaattggatgttcatatgaaggaaaataaaactagacccctatctctcgggccaggcactgtggcttacacctgtaatcccagcactttgggaggctgaggcaggtggattacctgagatcaggagttccagaccagcctggccaacatggcaataccctgtctctactaaaaatacaaaaattagccaggcatggtggcacgtgcctgtagtcctagctactcgggaggctgaggcaggaaaattgcttaaacccaggaggcagaggttgcaatgagccgagattgcgccactgcactccagcctgggtgacagagcgagattccatctcaaaaaaaaaaaaaaaaaaaaaaaaaaaaattcaatttaaaatggatcaaagacttaaatgtaagacccctagactatgaaactactgaagaaaacatgagggaaacacttcaggacattggtttaggcaaatattttatggggaagacctcaaaagcacaggcaacaaaagcaaaattagacaagcgggattctatcaaacttttaaaaagcttctgcagtgcaaaggaaacaatcaatggggtgaagagacaacttgcagaaggggagaaaatattttcaaactattcatctgacaagggattaatattcaaaatatataaggaactcaaacaaagcaatagccaaaaaaagaaaaagaaaaatcaaataattcaaatttaaaatgggtaaatgagctgaatagacatctctcaaaagaaaataaaaatggccaacaggtatttgaaaaaatgcttaacatcactaatcagggaaatacaaatcaaaaccacaatgaagtattatctcaccctggctagaatggctattactaaaaagacaaaaaataacaaatgctggcgaggatgcagacaaagggaaactcttataccttgttggtgggatgtaaattagtagagccactattgaaaacagtatagaggtccctcaaaacactaaaaacagaactaccatatgatctaatctcactcaaagtatatatccaaaagaaaggaaataagtatgttaaagagatttctacattcccatgtttattgctgcattactcacaatagctgagatatgagatcagcttaagtgtctatcaacagatgaatggataaagaaaatttggtctatatatacaatggaatagtatttagccaccaaaaagaaaaaaatctgtcatttgccacaacgtagatgagcttggagggcattgtgttaaatgaaataagccaggcacaaaaaagataaatattacatgttcttactcatatgttgaagctaaaaaagttgagcttatttaaagagaaagtagaatagtgattactagagacagggaaggttaagggtagaggggatatccaaaggttggttaatggatacaaaagtacatctagatatgaggcgtaagttatagtgttctatagcactgtagagtgactataattaacagcaattggttgtatattttcaaatagctaaaagagcagattttgaatgttcccaacacaaagaagtgataaatgtttgaggtgatgaatatgctcattatgctgatttgagtattacatattgtctacatgtgttgaaataacactctgtaccccataaatatggacaagtatgcatcaattaaaaataataaaggcaaaaaatacagttggaagtaataaaacatttattttgaaacaaaacaacaacaacaaaaaacattttggtgatactttttgtcacaaagttacagaaaccatgaaaattaagaaccatagttatttaaaagtctcattgaaaagtacacaagagttttttaaagaaactgaaaactggataagtagctagcataaaattcctgatgctattcctttgctctggaactctggaataaagaatctctaagaaactcttccatctttctttgatttccataaccttgacacttttgaagattataagttggttgcagtatgtccttcatttagatttatctactgtttccccatggttaaattcaggttattcatctttgtcagaaatatatcacagaagcaatgctgtgttcttcttattgtatcttatcaaaagtcctatagtaataacgttgaccagttgattaagattatatctgtcaggcccctccactttaaagctacatttttcctctttgtaattaataagtatttaatgggtgtccattgaaaccatataaaccattcttcctttttgtcaacttttcatttattcatttatagcagtatgtattcatggtttccttttttattcaatgggttatattccaatattatcactatttgttttgatactcatattgtcccagttttagacaatgggagttctttcactctgcactctggctcctgtgtcctcccctccccatgcccaacctttatttttttttttttgagaccaggtctcactctgtcgccaggctggagtgcagtggcgcaactgtagctcactgcagcctccaactcccggactcaagcgatcatcccatcacagactcctgagcaactgggactacaggtgtgcatcatcaggcctggctaatttttctaatttttggtatggatggggtctctctgtgttgcccatgctggtcacaaactcctggccttaagcaatcctctcacctcagtctcccgaagtgctgggattacaggcatgagccaccatgcccgaccccagcatttcagtatgaaaactgtcaaagatggcaaagctgaaagaattttacagcaagtacctatatacccacaacataaattctatcattaatattttacctcactttttaatctgtctattcatctctctgtccctctctccttccatctctcttatttttgatgcatgtggtccattttaagtaaattatagaaatcaatacatttctccctaaatacctcagcatgcatatcattcattagagttcgatatttgttaacagcttttttctttctttttgcccgtagggaaagaaggaagttttttcctcttgagaccaaatttccataaaatgagatgcaaaaattttaagtgtatatttgctgagttttgacaaatacatgccctatgcatcccatactcctatcaagatacagaacaaagagcactgtgacactcacctgtaatcccagctactcaagaggcagaggcaggaagattgcttgagcccaggagttcaagatcagcctgggtaacattgcaaaaaccatctcttaaaaaaaataaataaaagatatagaacaaaaaaagtccccacacctctttcccattcagtcgtccaccctccaatccccaaagcaaccacttttctattttctaccataaattagttttatctcttctggaatttcataaaaatgaaattatacagtatgcatctttttttacagagtttaaactctatgtactctttttgtaaggcttctttcactcagcataatttttacttttttaaaaattttttgggggagacagagtctcactctgttgcccaagctggagtgtagtggcatgtgatcataactcactgcagccttgaactcttgggctcaagcaatcctcccgcctcagcatcccgagtagctgggagactacaggtgcacaccaccatgcctggctagtttataaactttttgtagagacaaggtctcaccatgttgcccaggctggccactaactcctggcctcaagtgatcctccctccttagcctcccaaagctctgaattatattcataagccactgggcctggttgactcagcataatttttcttgagagtcttaatatgttgctacatgtatcagcaatttgcttctttttattgctgagtagtattccattgtatgaatacaccatggtttgtttatccgttttcctatgtatggacacctgggctgtttccagttcttagctattataaataaagctactctgcacaatcttaagtaaatcttctggtgaatatgttttcatttcttattaataaatacttaggagtggaatttctaggccacagggtctatatatgtttagctttataaaaaactgccaattttctgcatccttttaacatgcatccctcattctttgagcacgtccttgctttctggcacaaagagatcttccaggttgatcttatattttccctgctttcaccctggaattattcatctccccaagccagcatctgggttctacatgtgctcattactcatgagtctcctctctcagatttctcagtggacagatgtagaaactgtgtgtgtgtgtgcgtgcatgcctgtgtatgtaaatgtatgtacacatttatatctgtacatacctttctgtctactaatattaaaaaccatgagttcacactggtaattccaagtctaatccaacacaacagggttcattctagtttcttctcattcccttttgtagttcccttttctctggtttgtgttaacctaaatatatttatttatttgatcaatcccccaatgaatccattagttctatatggaactaatctcccatcactgtcgctgtcctctcttccacactgatttccttcttactacatttaagttttaacatcttgcactaatcggcccttcccacatggctatcctccttactctgcttaggttctgacacccctcaacagatcaccccctccaagtggatgccctttacatagtccttaggctctgacactccatgccaaggcacattttcatgtggattcccttgtcaattcactcaggctctgactccttatgctgagctgacccccagcctatgtggatggcccttccatgtagacaccctcctcaccctgtttaggttctgacttcccaggccaggccatccctcgatttggatgccctcctcaccctgctcaagattaaacaccccatgttgggcatccatctcatacggataccctgtttgtactgcttggaatctgacacccaagttaaaccacctctctgtaaggccagcgtctttacccacatggactgaaggttgcccttccacatggataccctcctcgctctgctcaggctctgacaacccatgcccagctaaccctgcacagatttgggccctgataccctgctaggtgccacattggcttcacctgtccagaaacagatgcttaccttgctctgccccacctaatggctttaggatcaaattgttcaaggaggcaaaagaatgaaaggggaaaaagaagaagaaatggaagatgaagaatccacaaggcacttttaatctaattgaggattgtactagttaagatccttttggctcaagtaagagagaacacaacccaaagtggttacacataagaggaacttattggttcatacaatgaaaaagtccggtactagtttaggacacaactagatttgggagtccaaataatgacattaggacagctgtctggttctttctctttgtcttgctctcttctgttttagctgcactatcatagaacctctacctttgtggtaaccaggtccagtttcacatgctcacagtttcattcaagtccaatggaaataaaaaagaaagtgtcttcttcctaatcattcaatcaaaaagtctggcattagtctgtactaaaccaaccactctggctaaaggaatagaatgtcatgactggcttaagcctaaggcacatgctccacctctagaactatgagtggaaccccattcaaacacatgatcagagatgggaatgaagttgtttccccaaagcaaaattagagataaaattactaagagaaaggtgagtgggtgctaaggagcaaaaaatcaataaatgttcaactacagaaatgagaaactcacacatgatgtgatgtctgcgagtgccaggtagtatttgttaattgtcaaataaatggtgtagaatagatgctatcgtctttcaagagaaggagaaatcacaacggaagtcttcttgagggaggaggaactttgaactatactttaaaggggaagggtacataccctgtgacttactaatttataactgtcaaagaatcttgcacatatgcaccaggagacatttacaaaatgctcataacactgttcatatgagtaaaatattgagaataaccgaaacacccactgactgtagaataaatcagtaatgatatactcacatagtaacacacattggtgaaaatgaatgaatcatagctacagtaacaacatagaaagatatgttgaaaagataaacaacatggaagatatgtagcatagtgttgaataaaaaagcatgtccagaaaactacacatagtttgctaacctttttctaaagtttataaacatgcaaaactggctgggcacagtggctacacctgtaatcccagcactttgggacgctgaggtgggcagatcatctgaggtcaggagttagagaccagcctggccagtatagtgaaaccccacctctactgaaaatataaaaattagccaggcatagtggtgcacatctgtaatcccagctacttgggaggctgaggcaggagaatcatttgaatctgggagatggaggttgcagtaagccaagattgtgccactacactccagcttgggctacagagctagactcagtctcaaaaagataaataaataaataaaaaatgcaaaacgaaaccacgtgttgtttagaagtgtgtgtgcatatgcgtgtgtgcatgtgtgtgtgtgtatgtgtagaacacatatattgctatgtaactataataacattgggaaaattacaagaaaggtaaagataaagccaaattcaggatatcagtgggaagtgtggggaggcagggaatggaatagggcagatcatagaagaatatatgttactggtaatgttcaggtttggtagtaggttcatgattatacaattacaaaaatagagaagacatgtgaatacagaagtgtgcaagacatggacagggaccatgagtagaatggagatactgcagtagataattcctatatggccttacgggcagatgtgattagaaatagactggatccaaatatggtaggactttgaaccagggaattgcataatgcaagttgtgttttaatttaattttacaaacacgtattgagcatttactattgttaagtcaattacaaagtgataaacgctggctctggggttatgaaagtatgaaaggagaggagtggccacactgccaaagagtaacaggatagaattaagtggtttattggatatggaaggcaaaaggtagggaaggagtcaaagcaaaccttgaggtttcaccaggctaggtggtaaaattaaaacaaaacaaaaacagaagctgacacaggagtcatattgagttcaacatagaaattcattgtaacatattccactgggctcagagatgcctttggtatacttggttttccaggagagcagttgcccagggcttcagttcatcgtaagaggagaatgaaaatcccccccaccaatgagtgaacttttggttagttcttggtttcgtgtttgtgtcttttagctaaactacacatccaatttccaaagccacaccctggtcacgaagtgagattgtcttcaaaacaatttcagaattacatagaattggttgtgtctgaactcaggggcaatgaagaccaagttctggaaagtgttgtggaatttctgatgaatgctttagagaggagccacattgagagtctgaggaattctgccaggcggaaatggctgcaccaaatccaatgtgctgcagagacaagtggggtgtccctagagccggtgtatagtgagacctttaaggccctcatgcaggtacgtttcctaaagcagtatgtaagaggaaacatttcctcaaagtaggcgatgttcaatgtttgcaaaagaggagcatcttgaattctcttgaaaaatcactgggtgctgctgtagatattttattcattccagtccattacaaatggcccaaagcctaggagagatacaactggagtgactgctggttgacaagatagaagcagaggagaaaggtagaaaagacagatgtagaaaagatgtcttgggatttctaatttcatttctgctaagagtcaaataagcctagaatggacaatagacagattatgaacaatatcagtaaggagatgtacaagcagttcaagctacatttcccttgcatggtattttgggagtcagttttaaaaggaactatttaaatcataaactcattatcgagtctgacaccacacaatatttcacagcattgcctagaagcaagctgagactactgcagaatcctgtcacttagaacgcatggccctgaggggctactgcctacagccttgccacctcctcagagactcccaggttgctgctattcacaggcagaaacagcacagccgccttctacatgtatcatagattccactaatccagggaacctatgccagtcatctcagctaaatagcgatacttgctcaattgaatcatctcctgaatggccgaattttccagtgtagttggaaatggggcaccgggaccaaaagaccactcaagaagaagaggcattgttctaacttgcttcagaggtctgtggtatcctaagagaaatctcgctacatatttgttaatgactccatagatcttgtatgtggaaagaaggaataaaggcaaaagaaaagggcatggaaagcaaacccaaatatatagaaagaggagaaaaatatcaaggaaagtgtctcacatgtccccaatttatggatatgtttaatgtatatattgacacataatattgttaataacataataataatatttaaggtacagagaatttatagttgcagaaatagtagttgcagaaagtctgcaatcttgggccacaaaaaaatccttcctgaaattacatagatcaaatatacaaagtgtgttaagagttcctcgagagcattttttttcactttcacatcacagtcgacggtcaagaaatatgagtgaagtgaaggcaacttcttggcccagctctctctctctcaaatcaacactttcaatagaaacacagacagttgaccataggtcaaaggaatccaagttttaaacctctaaatttgagtagacttgagagttttttggttttgtttttcttttctggtaaaccagtccagttggcatagaagaaacccgttatacccactgaaactcagacttacaggatagctatgctgtcaaccttttccccactgcccatgaatagtaatatatgcattctttattcaggaaaatgaaactactggggcaagatgcatgaattaactagtaagggggacatgattaggggagttctttggctgttggcaaacacatggtcggaaacgttttgctgtaggatgctgaagcccatggaaataaaaagatcagtgctcacatttccctcttagaagaaaacctactactgcctgagaaagggaatgttctattgaggaatgtggcttgtaccttagatgatgctcaatttgtactgaacagagtgctctacagggacatgaaaggaatcaggtaagaacttcttgaagagattggtttcaccctcctaaaaaaataattccctttctgagtaaactggcatcaagatcccagctagctgctcaaaagagaggtgcctcaagtcaccagtgcttctggagtagaagctgatggcttccagtcctggatgatttcacttatttctagagctcgctctttggtaatgattcgccacatggggactctgcgtcacaatatcatctcaattatttctgcctgctccataagttatgtctctggagttctgtttatatttgttttctatgtccacatccaagcttgttttttttttttttgtttgtttgttttgtttttgttttagtctttctcaagtcagacctccaaactggtcatcttatctgagtccactgctcggtcatataatgccacagattgtgaatagagaatcgctctagtttcctccatggtttaatctaaatctctccctgtgcctttcttccatcctcatactctttttcctcagctttacagtagtggatgaagggaagccaatccatgttccccaagttcagtaccatgggaacatcttcttctggaaccagtcccgtaataagcatgattataatggttcattcctggctctgcctcttcaagatgcatatatgaggatctttggggtcttggctgttgatacccttagagatccccacgaaataaacatctttctacctcatgagatcagattctatcaggtaagtcatagaagtcttcaagagcgatggtaggatggcctctctttctaatactttttaaagagtgaaacctgaaatccgatgagagtaaagctgtgtatacagataacatcatcatacttgctcctgttccctgaatgtatgtttcagtcttttgagaagttccccattacttatggaaggactttcagcctcagttacatatccatgcctcagcctcatgtgtcccatagcattaatcacaggaatagaattttatgctacagaacagaaatccaaccattgaccattaagacccacaaagcgggaatgaacttttagaagggacgtatttgtgttttactaacagtggtatctatctagaaatcttttgtactttctacaaatggtactaattctgatatgcatccccataggtcttgatttcagtgttataatttttgaggatgaaaaataaagaaaaaggcctaaatgtttcttgggtattcatgtttttaaattagatcacaaaatgataggcacttttaagatcatgaaatagctagaccatttctacaagcatttttatttaatttatggatagaacttgcaataaaggaagatcaaaagcctttatggagacaatgaactgtggagtctagcagcaagttaggaacttgaacttgctatgcccttatcatttgttgccctgtaagcctttggctctttatgtttatttaccattatttttcactttctcttcccatttattgggtggatagttgaggaaagtggtagtacctctttctctggacacattttcaataataaaattcattctcatctgacacaagaattatgtgaagatattaaaatggaggagtatggagttatcagtaggtgaagtatatatagtcttgctagagagcttttcaaaatgaattatacattggcactctagcccttagaggtaaaggcttctgggttacccttagatgccttgagtcctaatataaaaggcatataattttgaagagtttgtgattcctagagtttcctgacaacaggcccacatatgggttctaaagatttcccatcccttctctgtggaacagggtctccttatgcctgtaagaggactacgtaatctagcacactgtgggtcttggaaccaaacatgtcctatactgtcgatctgatgatagtggccatgtctgcacagatgcaggcattaacattggcatccgatcaaggcagctcctacccacctgcctaagattggcattcgttcttggctttttaacatttttttctcatttcaaagtttatcttgttcctttgatgctattctctaatagcacataccacaaatttcactggatgactatcaaaagcataaaaaggtatgtgggtctctctctttatacctcttttttttttttttttttttttgtgagacttgctctgttgcccagattggagtgcagtgttgcgatctcagctcactgcaacctccacctcctgagttcaagcaattgtcctgcctcagcctcctgagtagctgggattacaggtgtgcaccaccatgcccagctaatatttgtatttttagtagagacagggtttcaccatgttggccaggctggtctcagactcctgacctcaagtgatccgccctgccttggcctcccaaagtgctgggattacaggcatgagccatggcacctggcctataactttgatttcttgatgatccttttttttaatagtagaatctggaacactgccctttgaggactgctgaataatttgtaggaagtagattatcatgaagtaattaaattactggtaaaggtaatccaattactatattactaattatttttctattttaaaaagaataggctatttgaattttctgtctctacagggtgttgctaatgtctttagcactgcctatcactacgtccacagccgggagcacattctgcatattgtgatcactggcataggctggctttatgacgtcacatccagcatcacctccatcactacgtactttgtagagcctagcccagcccaggtaggcaaggctcagtagtggtagatctctccaaggtagccgagtgtctagatgttatttcttgctaatatttgaaaaccatattaattagctattagtctaaaggaagacagatttcccaatacaagacccttggttgtgagtgacaggaatccatctcaaattgccttaggcaaaagggagaattaactgactcacgtgaccaaaatgaagacagggcaggagtcaagctatctttcaggatggccagatccagggacttgaagccatcagggctctcttgtgttcatctctccacttctcatgtttgtttccctctgtacattggttttgttcttccagctaaagatgggctttttctgcagagcaagtcagatgcttactaaaagcatcctgtaaaaagttccagtttggaaaacccaagaaagaagacggagtctcgctcttgttgcccaggctggagtgcaatagcgcaatctcagcttacctcaacctccgccacccgggctcaagcaagtcccctgcctcagcctcccgagtagctgggattacaggcatgcgccaccacgccaagctaattttgtatttttagtagaggcggggtttctccatattggtcaggctagtcttgaactcccgacctcagatgatccagccacctcagcctcccaaaatgctagaattacaggcgtgagccacagtgcccggccagaaaactctttttgacttatcctgagatacatacccctggccagagtgtggagttcacagtaatgggcaacactcaccagaatcatatgggtggagtgggaagggactaggagctgctgttttggaaggactcagttatatgacaccgatttttttaagccctcctatccataatgtcatgaattcttgctgactgtttgctttgcttctttatactttgtgttaggattttgcatatgatgagagtgggtggaaaggtttttcctttcagaaaggctgaatgactctgggaggtgcttggttgggtggtagtgtcacctggttgtctcccagtcccttggctggcccacacaggcatgtccacacttccctccgggctgcttctttcctttttcccaccaggtccctacttccctccctcagtagctaggtcaatctgatgaggccttggtcaatgagggcagaatcatggagctctcttgtggggtggccaggccatgggagcctccaagggcacttaggcctggggcagagcaccctgtttgaagggccccagctacaatggcccttcaaagcacatggggccccagggaagattcagaagaacatcgtcagggccttaagagaaacaacacatagggcaccatggaaaagccaaaatagcccaaagcagcagcaagaagcatgacttcagcggctgtaagttcagaaccaagagtccacagacaaagccaccagggtcacaccccatctgacctggaccatctcatagtggtgaagaagatcctgccaaaagtcgggggagagaaggaccacccagcagtcgggttgtgagtgagatcatggtggggcagagaccagaacagcctgtctaagctcttttcaagcactcaacgatcataacttcctaagcctccctcttccccttctgcagcccctccagattcacatttctctctcttctccaggctgctctgtgtctcaaagataaaccagtatccatgggctctttggccctttggcttctgcttgcatttgtccaatgacagctgccaacaggacactggagggcagaagtagagtgcaactggggcattgatgcttctgtttccctctctgtcaggttgctgtgggttagctgtgtttctctcctaaaggccacttcacctttcatcaggcagtcctctccacacagctgtcctttgtcggttctggtcattgcttcccccgtccccgccccctctccccgcctcttcaggctaagagtggtaacagctcttccttattaccaggttggaattctaaacactgccttcataaatagtccctttattaaacgccccttaaattacccagctgtggcaatctgcttccttgtgataccctgactgatacgaattataaagtaaatcctgtgatactccccctcacctcaagcccatgttcctgtaaggtacagagtcatagaggaaaaaaattactgctctgttaacagtaaccatagatgagtaaaaacagattcaaattctcttaggtatgaaattcagggtattttagcttatcaccccaaagcacctctgtctatttctttggagtaccgaacttattaaataggtaactgcatcaggcacaataatgccttcccataagatgtccatgtccaaattcctggaatctgtgagtatgtcagtttacatggctcacgcctgtaatcccagcactttgggaggctgaggcgggcagatcacgaggtcaggagatcgagaccatcctggctaacatggtgaaaccccgtctctactaaaaatacaaaaaaattagccgggcgcggtggcgggcgcctgtcccagcttcttgggaggctgaggcaggagaatggcgtgaacccggaagaggcagagcttgcactgagccgagatcacgccactgcattgcagcctgggcgacacagcgagactccgtctcaaaaaaaaaaaaaaaaaaagaaaagaaaagaaataaatttggaaagaagctagaagtccaatcgtcaatgtgcgataatcttaacagttttccaaggataacgttgacaacatttcccttctaaagagtttggaagaacccttgatgtcatggagtatagaggcaagaggaaatttcacattacaaaacagctgttcctcttccaagcaccattcaacatgcagcccctatggatcctcttatcatatttttaatttgttccaataattagttatctttatttttatttttttagagacaaggtctcactctgttgcccaggctgaagtgcagtgacatgatcagagctcacagtaaccttgaactccgagactcaagcgatcctcctgcctcaacctccggggtagctaagactacaggcatgccccaagaattttttttttaaaggaatgattcataaaaacccctctttacatctcttaattgaatttgtgtttcctacagttactgtatttacagaatatgttaatatacgttcttataaactagtttctacgaaaaaatattgatcaagactcattaaaatattttcacaacccacatgtaagttgtgggttgacctacagtttgaaaacttcttagaagtaagggagataaagaagcagggagaatgaagattgtttagtgaggtagaaggagaaccaggagagagtgtcgtcccaatagcgaagtgaagaaagtaaattggccaggtggtggctcacacctgtaatcccagcactttgggaggtcgaggtgggtggatcacctgaggtcaggagttcgagaccagcctggccaacatggttaaaccctgtctctactaaagatacaaaaaaaaaaattagccggggccgggtgtggtggctcacgcctgtaatctcagcactttgggaggccaaggcaggtggatcacatgaggtgaggagttcaagaccagcctggtcaacatggtgaaactctgtctctaccaaaaatacaaaattagctgggtatggtggtgcatgcctataatcccagctacttgggaggctgaggcaggagaattgcttgaacccaggaggcagagattgtggtgagccaagatcgtgctattgcactccaacctgggcaacaagagtgaaactccatctcgaaaaaaaaaaattatcctgttctctaatggtactaagtaaaatgtcactgtccttaaagccagaggtcatctaagctttcctattttttttctatttatctgtccccaaaagctttaatgagaatatgaggtctaattactcctaatgaaatgccttcctcttttcaaggattcagactatgttttacgcaacatgatggttacagggcagctgggtctaacagaaatccacaaaaatcctcctaccatccacaggaagtcatgcatcttcaggttagagacatgtctgttttgtttgactgctagaacacatccttctggtacaatagtagacctgaaagacacagcttctgactcttgctcatacacgctgacttttattctttctttttaatttaattttattttattttaagttctgtgatacatgtgcaggacgtgcaggtttgttacacaggtaaacttgtgccatggtggtttgctgcacctatcaacccatcacctaggtattaagccccgcatgcattagctattttttcctaatgttctccctaccctcgcccccttgacaggccccagtgtgtgcccttccctgtgtccatgtgttctcattgttcagctcccacttataagtgagaacatgtggtgtttggttttctgttcctgtgttagtttgctgaagataatgacttccggttccatccatgtccctgcaaaggacatgatctcattcctctttatggctgcatagtattccatgatgtgtgtgtataccacattttctttatccattctatcattgatgggcatttgggttgattccatgtctttgctactgtgaatagtgctgcaatgaacatatgtgtgcatgtatctttataatataatgatttatattcctttgggtatatacccgctaatgggattgctgggtcaaatggtatttcaggttctaggcctttgaggaatcaccacactgtcttccacaatggttaaactaatttgcattcccgccagcagtgtaaaagcgttcctacttttccacagtcttgccagcatctcttgttttttgacttaagatcaccattctgactggtatgagatgatgtctcattggggttttgatttgcatttctctaatgatcacactgaattttattctgattggcttttaaagaaaaatttctgcagaatgttgtctgcctgggacatatttactctttttttcccaaatccttttttcttgagagatgagttctcactgtgtcacccaggtgggagtgcagtgctatgatcttagctcatggcagtctcaaactcctggactcaagctaacctcctgcctctgcttcccaaatagctgggactacacgtatttgctaagcccagctcatttaatttttttttttaagagacagggtctctttatggtgcccagccttcccaagtcctttttaaaacagatttcattggcattttattttaaaattgcatgttttaaagcatgaaagtgttttattttccatgaatttccttgtaaatatggaattcaacaaaagcccaccatgattatgaataatacattcacatcactcatcagagctcatgtgtgaatattagcaagactgtgaatgtcttttttatttaaagaagacatgcagagttggagagaaggcaaagcatgttgtatttaataagtactcggttctaaattacttagaatgactctcacttgtcaaatgcaaggaatactactaaaatgtgtacaaatgtaaacagatcttaactgagaacacacctattgcaaaagggaatgactgcttcttagggggtcactgtcgttgagtaggcggtaactcagtaatcccagaccagtaggctaactcaacatttaattacatatgtcaattaaattttagtttggcctcatgccagaatgttggttcaatctcaagctcttttccacatagttattccttgtgctggtcaaaagttttacagaagtccttgtaatacccagactcatagccctggattctttttttttatgtattttttaaattatactttaagttctagggtacatgtgcataacgtgcaggtttgttacatatgtatacatgtgccatgttggtgtgctgcgcccgttaacttgtcatttacattaggtatatctactaatgctatccctcccccttccctccaccccacgacaggccccggtgtgtgatgttccccaccctgtgtccaagtgttctcattgttcaattcccacctatgagtgggaacatgcatagccctggattcttgtgtgtaacttagaacagatgtctttggaggaagtcagttgaccaatgggctctattgttattcctggaaagcctagtatgatgcattattactatggcactcatcgagacacaacacaaagtggtggctcagcagcagcaaaaggggtgggaatagcagaaggacatcatcttacctgtcactgtaggattgatatagaaactataaatgcgcttttcgaggatgcaaagtaccaattttttacaaataccttaaagaaatggcatatcagaattaatgtagatggggaaagggaaaagaaagaaaaagaggtgtgtctgtgcctcaccaagagaaagaagcagccaccacatttccatgaaaatctcaagtctctcactgaggcagatgctatagatgctctacccagatccccaaaatgccttttaccagctgctgtaggcacggcctggctcacaccgtaactttctctggaggagcgcccttgagcgattggagctcttcaccaggagttacctaagagatgggtaaacactcccccagcccaaactgcccacacacacccagggcagcttagagccaatgactgactagtgctaggatgcaaaaaacccctccctttgcctcaaggtgggacagattctttggtacaattgacctttcagagctccccttgggatcaggccgaggctagacttcatgtgaaattacattcttacttagcttcttccccttgcctgtcctgcttcattcagtccctcacaggtttctccagcgaacactcgctcagtaaatcacttgcataagcatccctgtctcaggctctgcttctagggaacccgacctaacacactcatcatttctgctggcactccaccaaagcataatggacaataggtaaacaaaaaatgaacaccttcagataagccaagacaacgaagcaaagtatcatgatggagagtggcttgggcgctgcttgagattgggtggtcagggacgccttctctgccgaggggatgtttgagcagagacatgagtgagcaaacagacagccatgtgaaatcaagggctagaatgctccaggcagatgaaacagcaagaagggctggcatggtggaagtgaggtaggcacaagagagtaattcaatatgttttggtggaatgatgtgaacagacagatgtttaatatccttgtgcttatttggttttgatttcagagatttcctctttaaatgtactgacagttcagaagttgttctggcttctgcctgtggagaaacgcatatagtagttccacttcgtgagagaacaggagaggctctgggagtcctcgattttaacatcggccaaaataggatgttgttgtgtcaagaatataaagatctacagaaaatgatgaaagtggtccaagtggcctgctatgaaatacttggcgagttctctggagagataaagaaaaaatatatcttaggtatcgttcatgtggcatcagtctaaattcacaggtttaataggttttggggaaatcacagggagtgcaatgaaatatgcactttctaaaatgaattgttacaacatacacatcttttcatataaaaggaattcccttatgcagtcttgcgctgacgagtaatgtctacaaattaaaggaaacagcctggaatcacattctcatggttagattcctacagttttagagctggaagggctcataaaggcaagctagaactagcatgtattaaatacccccattatgtgcttcagatattatttcattcaatccttgccataaccctatgagatgaatagtgataccccacttacaggtgaggaaagtaagcaaattgcccccagtcacacagttaagaaatggtgagggctggatttgaacctagatttgggtgctcttcccactatgttatacagcattaagtaatcagaacatctcgttttacagataaagatgctaaagactgcaaaagtaaagtggattatctaaggtccaatagcaagctggtgggagagccaggattagactttagtttttgtgattccacatccactaggctactctcagcgcaatgccagctggagagagggagggaggaagaaggcctggaaacctttggcttcctagaatgaagtgaatagaattagcagagtaacactatgtgggattgagccaaaagatttgtaactatgtcatagagtgggataagaagaaaggagaaatttcatgtctcctaagtgttcactatgtgtaacgcctgtaactaagcacttttacatatatcatcttctctaattctcacagctaaccaaggaagtagggattaagcccattttcacagaagaggaaaaggatattcagagagacaatagactaataagggtgacagcgtgtgttcaaaccagggtctaactctaaaacccaagtttttgccttttctcaaagcctcttcctatgagcttcaccgggagtaatttcattgctttcttttgatttcatggctaaagaaactgagattgtttaaaaccaaaggctatggtctgctttttcttgacaaaaacatttactataatatgttcagaatcctatgaaaaagtaatgtacagcaatgtacattagactgaacagcaatgtgagctatcattttgttattccagagattgaaaatgtcagggaagtccagcgggcaggaattctcttcttccgaatcatgctgctcgagctacaggaaagcatccaactactcaattccatggaatttgtgtcactgttgctctatgaccatactcttgtaacagagccaaattctcctcaagacagcaaatctatggagttggaagccaacgtgaaactagtgcgtgacatcctgaaggcggttatcttgttctttcatccagagttggaattttcaagtgactttggaagttgggataagtgtaaatttgtaagtttttttttaaaaagcaccttttaaattgaagaatcgcctaaacaaatttaactgtacaaatcataattgcataaatcataagggtacaaatgcaagaatttttactgagtggaacacgttcacgtaaccagacctagatcaagaaatagagcatttatggaatcccaaaagctctcctttgtacccttcctcatcatcccttcaccccacccaccccaagggtaaccatcatcttttttttgagacggagtttcactcttgttgcccaggctggagtgcgatggcgctatctcggctcactgcaacctccacctcctgggttcaagcaattctcctgcctcagcctctcgagtagctgggattacaggtgcccgccaccacgcccagctaattttctgtatttttagttgaaactgggtttcaccatgttagccaggctggtctcgaactcctgacctcaggtggtcctcccacctgggcttctcaaagtgctgggattacaggcgtgagccaccacacccggccatgggtaaccatcatcttcacttctaacaccattgattggttttgcctattttaaaatctatataaatggaattatgtaagctgttgaactgggcactgtatttctgcttcctggtgatcccataaattttctcttgttgtttgttcacagtatgttaacaaatatttagtcaacaatatttgtgcctttgatccaactgccaagcatgtggaagttaatgtacagcttattgatgaatatatcagaggtaaatttccacttaattacagcctaaatctatgccaacagcaataaaacacagttgtgatttttattaggataaagcaagtgggtcataaattcagtttttaggagaaaatagttataagtcttctaagaggagggacactatgtaatctattgcatcattccccaaagtcattgtctatgccacattttgagaattcaaaagcacatctatctcccacttattgactacatgtgcattatttatttttaaaaatgcaaatggggctgcaatgagaatggaaattttaagcaaaaaggctatctttagcttaataaataaccaaagaaaataatagactttttcaaggaggagaatcaccaagaatggagagcagcgaggctctcaggttggagaagacgattagctgtttggccacagggaataggccacatatgagagtaaatatacaaacagaggcccaaggtcctccactgacctgtattctcccaccagaggcctcaggctgtgatgaggaattcatttatagtttgtttttttctttgttatgaaaagtaatcataattgggaaaatggctctgtagaaattgctcactaaatctatccctttcctcctcttcccgctctcctactatctgtggaggctctagaccaacgcagaagagtttctggattaacggggaactatcctagcttattcctgagaagccttgaccaccaacgctacccaccactttctgctttccaatagtgccctctggtggaagaaatattaattgcagttaacggagcccgactcagccagaaaatagcccataggctccccaatcaccaccgccaagcctttagtgttaaccacagtctccgcagcaatcaagaaagttcgtaggtcacccagataccaaccctctctccttcagatgcagttatatcaggaaattctaagcttccagcttaggggaagggagaggaattcttcggggtgcctttctgtttgtgccagaaggagaggagtcttcaggcagggcaatctgctgctggaagtttacctggcctagcagctttaagtaagggccctactccacgaatctacccagaatgaaatgtcaccaataatacctgtaggttcagcctgtgacaggcagagactgctggactatatagcatagctcctaacccaccacgccttccaaactattattttaccaaaagggcagaattaggactggtaatgtgtccatactttcttagggcttccgctgccaactctcacccccacttcatcctagttcaggaaaagagtatttcctaatgtaaatgacgagttgatgggtgcagcaaacaaacatggcacatgtatacctatgtaacaaacctgcatgttgtgcacatgtgccctaaaacttacagtataataataatttttttaaaaagaaagaaaagggtatttttggccaggcacagtgactcacacctgtaatcccgacactttgggaggccaacgtgggcagattgcttgagcccagaagttggagactagcgtggacaacatggcaaaatcttgtctctccaaaaaaaaaaaaaaaaaaaaaaaaaaataactgggtgtggtggtgcacgcctgtaatcccagctactcaggaggctgaggtgggagatcacttgagcccaggaggttgaggctgctgtgaaatgtgatcatgccactgcactccagcctgggcaacagaatgagatcctgtctcaaaaacaacaacaacaaaaaggagatactttttttattctgatgaaactctaggcagctgtgtcttgcctttagattgagccagtcatctgtgaagtaacattgggtagctttgttgggcaggcctggcctcccaagactgtgccattgcaggtgagtgctgctgacatacttccctgtgggggaccctctgactccagtgagcactcccagacagctgtgtttgcagtagtacatcaatagcctactattctctgtcactttgcctaagatactcctagtagttggtcttttctacctggagattcatgacgtgaccaccctctcaaggacctattctccccactccacttgggacctctgctgccagcctcacctggtcgttcaggatgccccataactgctgcatgtctccctcccaggaattttagacagatgttgcctgtttggaaatgttcttagacccagaggcaagaagagctgtcccctattgcaagtataaccagaatcacttttctgtgtagaacctgggtctctgccaagtgaccatacctcctcccctaaatccaagtgtttacaagtccacagacattggtcttggcaggagtgcccccggccctccacttctcctacaggggtcccagagctccaactctgtcaaagcagccagaggctcagtgctgtcaccatttataaagaaacccaccagcttcctcaataaaatgacaccatgatcctctaagggtgacaatgaaggaaggtgccttcaggggaggactgctggactcacagtcctaattaacttttatcttcaagattcgccttccctgggagatccttccctaattgctactgctgccatcatggtggctctcataggtgccacgctccctgcaactccattacaaaaatggaacatgactcattccttaactccccactgcacagctaaggacctgacaggaaccttggtagaatgattctaccgacaatccagaaataacaagtaggaaacagcactgaatctgcaactctgaggacatgcctttttctttgaaatgggtcaagccaaaatggacaaccagacaccaagaacattgttctgtcctattcatttaaaccttctgtatgctaacattggtttggattcaattacagttctctgcagtctttttggacttagtcatcttgaatgggaattgttggctccctcttaaggaaaaaacttgccatcgcagctagacttgggtttaatagagagctaagagtgcaccatttatttacaagttgctcacagattttaggccatggaggaggagatatcagttcagcttgagaacagatttcctttgtcctggcaagagccccttaaaaatgccttttagttacgagttatgatattagacaagtactcatacaatgcacaagagaagggtataacactctgttctgggtaaagatctcaggcctggatgtttgacctatttcccatgcatgcaaaccccctgcttttcagttccaagttattcagaggaaaaaagacaatcaaaccagccattctctttatgtttcttatcacttcttgtgatttaaattttgaaattttctaacagtagttattaagaggaacaactaaatacagttttacatgtatagataacattactgctactttgatatctgattaaagacttttaaaaatgagcttgatgagacgtggagcatggtggcatgcacctgtggtcccagctacttgggaagctgaggcacaaggattgcttggggccagaagttcaagactatggtgcacaatgatggtgcctgtgaatagcactgcactccagcctgggcaacatagtggataccgtctctagaaaaaaaacttggtttaataagaacatttttctatttaatttgacactcattgtttaaaattttagtggctgttaaaactgtcttttatcctgaaagcatatatatatatatatatatatatattttttttttttttttttttgagatggagtcttgctctgtcacccaggttggaatgcagtggcccaatctcagctcactgcaacctctgactcccgggttcaagagattctcctgcctcagcctccccagtagctgggattacaggcacgtgccaccacgcttggctaatttttgtatttttagtagagacggggttgcaccatgttgaccaggctggtctcgaactcctgacctcaggtgatccacctgccatggctcccaaagtgctggggttacaggcatgagccaccaccccggtcacaattatatacatatacatatacatatacatatacatatacatatacatatacatatacatatacatatacatatatatatatttttttttttttgagatggagtttcgctcttgttgcccaggctgaagtgcagtggcgcgatctcggctcaccgcaacctctgcctcccaggttcaagcgattctcctgcctcagcctcccgagtagctgggattacaggcatgtgccaccctgcccagctaattttgtatttttagtagaggcaggctttctccgtcttggtcagactggtctcaaactcctgagctcagatgatccgccccctcggcctcccaaagtgctgggattacaggcgtgagccactgagctggctttaaattttttattaaagtaattgaaaaggtcacatagaactaaaagcctaaaaagagtcactagcccatatcttctctttcatactcttcagtccccctcgccaggggcaaccatgttttgttctttcactgtttcttcttggcatttgcacatctatttctgttatgcacatattgctgtcttttgattcatcaattttaaaccttatcagtcaatttcctctgattataaatgaagattttgttctgttataccaccattctcttaccccatcctcccaatgtagttatatttataatttggggttaaagatgcaatgtttacatgattttgcctatgcaaatattatacacagctgaggattgtagcatattttgattcctcattttttttgtttttcctgaagtaaataattgtcttttatttttaaactttcttagttttatttgtacttcttgataattcccaccccttccatttgtctctcccataagacagttctatcaggtaatttattagttctaatttattttcttttcccaaagccatctcttctagagatctcagttcctctgtttttgttttgttttgtgttttgagacagggcccccctctatcactcaggctggagtgcagtgccacaatcacagctcactgcagcctcgacctccctggctcaagcaatcctctgggctcaggtttccaagtagctgggactataggcacgtgccaccacacccaactaatttttttattttttgtagaggtgggggtctcactatattaccaggctagtcttgaactcctgacctcaagggattctcccacctcagcctcccaaagtgctgggattacagacgtgagccaccatacccaggcttcaattctttctctatcagtggctcatgcctgtaatcccagcactttgggaggctgaggtgggctgatcgcttgagcccaggagttcaagagcagcctgggcaacatactgagaccctgtctctgcaaaaaacttggaaaaaaaaaaaagctgggagtagtggcatgtgcctgtagttccagctagtcaggagagctgaggtgggaggatcgcttgaacccaagaggttgaggctgcagtgagccatgtttgcaccactacactccagcctgggccacagaacgagaccctgtctacagagaaaaaaaaaaaaaaactcctgggcttaagctgtccttccacctcagcctcccaagtagctacaggactgctgccaccacacctggctttccattgtcttttttaaaaactgagacataattcacatgccataaatttcactctttgtacattttaaagtgtagaatttagtggttttgaatatatatcccagattgtgcagttatcaccactatctaattttagaacattttcatcaccccaaatagaaaccctgtacccattagcagtcacttctttcctctccctctagctcctgggagccactaatctactttatgtctctatggatttacctattctggacatttcatatacatggaatcacacaataggtagccgtttgtatctggcttctttcactcagcatgttttcaaggtccatctatgttctagcttgtatcagtacttcatttttgcgtgtgtggctgaataatattctatgatagacaacattctgtttattcatctatcagttgatgcacatgtaggttgtttccactttttggctactgaattatgcctccattaacatttgtttacaagtttttgtgtaaacatgtattttcagctctcttgtatacatacctttggagtgcaaacatatggtaactctatgtttaactttttttggaaaagactccattgtcatccaactttaaagattgctgttgacagcctgggcaacatagtgagatcctgtccccacaaaaaaaatgaaaaactttgccaggtctggtggcatatgcctgtagttccagctactcaagaagctgagcccagttaaggctgcagtgggccatgatcgtgccactgcactccagcctgggcaacaaagtaagacttaatctcttaaaaaaaaaaataggcaaagattgctgttaagaagtctgaagcctttctaaatcagtgtgacctttctttgttttatatctctccagaagctgtagaatcatcccttcatccccaaagttgcaaaaatttcataatgatatgcctttttatgggtctgttttcatccatcgatctggatactggctgggctttttcaattgtgaaatctaggttgttaagtgctggatgacttcctccatggcatcaagattgctacttacagctgtgcagtttgtacactgcacaaaggtgctctgctgaggaggtgggtgggggccaaaatgtatcccggattccattcactagactgtgtgccttaacctgaagctacatctgcttggaggaggagcatctttttcattcaccaagctgtgtgcccacagagcgcgttccctcacagtaggtgtgtttttctcacctttacacaaaggtgacctataaggctggtggtggccctgccctcttttttctgtattcactctttggaattcctattattcagacattggatctcctagattcagtcttcaaaatccctatattttctctcctctttcctaaacagcttcaacaaacccttctgaaccctttgaggattctgggatatacagaaggttggttctaggctttctccactgctgatttaggattccacttttctcctgtctgctaccacttcttcatctgctttatatttttcaaattttgttgttctgtctttcactcaactaaaattatctcagtgctatccatgtggcaggccctattctaggttcctagggtacagtagtgaatgacatagaacaagatccccgccctcaagaagcctacattctaaaggggagagcagaggataagcaataaacataataaattatacactatggtagaaaataagtgctatgggggaaaaagcaaagtcgagtaaggcagtggatgcaaaggtgggaagcagggaggaggcacgggctgcaaatttaaatagtcaggtaggccttatcaagaaggtgagatttaggccgggcgtggtggctcacgcctgtaatcccagcactctgagaggctgaggtgggtggatcacctgaggtcaggagttcaagaccagcctggctaacatgtgaaaccccatctctactaaaaatacaaaaattagctgggcatggtggcaggcacctgtaatcccagctactcaggaggctgaggcaggtgaattgttgcaacccaggaggcggaggttgcagtgagccaagatcgcaccactgtgctccaacctaggcgacagagtgagactccgttcaaaaaaaaaaaggtgagatttaagcaaagatgtgaaggaagtgagggaatcagccatatgaatgtacaaggaatattccaggtgttgcttgatgttattttatcctaagaaaagaaaaagagtattccaggcagagaaaacagccaaagcaaaggccctaaggcagaaacaaccagtgttttcaaatagcaacaaggaggccactgtgtcagcagcagggtcagagaacgggaggtaagtaaggagatgagttcaggaggtaatggaggactgaatcaattagggtcttgaagactatcataatgtcttgattttatggcttatggtgatcctcctgccttgtcctccaaagtgtgggattacaagcatgagccacaacacccagtgaattagagccattgcaaggttttaagcagaggaacgatatgacctatgttttaaaaggatcaccctgctgctgtaatgagaagacactttggaggtcaagaagagaagcagagagaccaactagaggagttgttgcaggaatctggtggaaatggtgaaaagtggtcatattatatatatttgagaggcagagccaaaatatatcttgacagtttgagtgtggaatgagaaagaaacagaggagccaaggttgactccatggtttggaaggatggagttaccatcagctgagatggagaacacgtaggtggagcaggctttggtcgggggagatgaagtgttcagattttgacatgctgagtttgagatatctattagatatggaagtagagatgtgactatgtagatggttaaataaatctggagttttcgagaaaggtctaagctggagatataaaatcgagattggttggtgaatagatgattggcaaagagaggaaagtctcctaggtgggaagactgagtagagacgattctgaatgttttgccacaaaggggagcaaagaatggtgtggtaaccggaggaggaaatggggtcaaggttttgttttgtttctcagatgggagagataacagcaggtttcattctgatgggaaatcctgtagaaagcaagaagttgacaatgttgaagacagagaattcctgaaacaatgtcctcaagcacgtcagagaggatgggctgttgttagagtaaccatacgttctatgtttaccttggaacagcccaagtttttgcttgttgttctggtgacttgtccagttagcatcctctttctctctcaagtgtaccaatttgaacaatgaattatttgactaccctggatctaccacaccaagggaggaattggcttaagacagcaagaggacagagaacatgggtgcagatgagagtgagtgggtaggtgtgctggtagaagtctacggaaggagaatatgggtgcagatgagagtgagtgggtaggtgtgctggtgggagtctatggaagttgccttctgattgtgtcaatcttacagagaagctgaaagcagagtcatcagccagagtgaagatgggagaagaagttgttgggactttgaggcaatgggagtaggaattaaatattggtgtttcttttctcctgatctttctatcattggttttatgtcttcttttattaattaattaattaattatagaggcagggtctgtctctgtcacccaggctggagtgcagtggtgtgatcatggctcactgtaacctcgaactcctgggcttaggtgattctcctgcctcagcctcctgagtagctgggattacaggcatgagccaccatacccggcccttatgtcttctttttctttttcttttcttctttcttttcctttacattagtcttagtaggaatttcagacgtagcaaaattgaatgcatgttaatcatctagaaaagcattatccattcaatttctttcatattttaacttggtggtctccaaagttaagtggaagcaccccagaagattttttaaaaaactgtctctggggcgcaagaaaaatatcaaagatgattctgttgagacattgaaagacagaaagaaagaaagaaaaataccaaaggactaaggacttttctttttttctttgtttctttttttggagacaaggtctcactctgtcacccaggccgaagtacagtggcacaatcttggcttactgcaacctctccctctcaggctcaggtgattctccctcctcccacctgagcctccctagtagctgacactagaggcccacaccaccatgcccagctaatttttgtattttttgtagagacagaccatgttgcccaggctggttttgaactccaggactcaagcaatccacctgccttgtcctcccaagtgttgagattacatgcgtgagccactgcatccggccaaaggacttttctttataatggttttaactcattgttaatttctattttttgtttaaaatgttttaaaataaataatttataaatatatatattataaatatatatatatatgggcacatgctcaatgtttgttactgatagaggtacatgagcaaaagagtttggaggccactacattaaactatgaattttgtaaatataatttgcattgatttcaatttacacatgacttgatttatagctacatcatttaaaaagccactacatgtgatattgtatagaaattatgtgatattgtacagaaattatgcttgtgacactgtacagaaatatgcttgccatgggaatgaaactgatatacgtgcaagaactcagcattcatcctagaacaaacttccccctcaaacttcgattactagagaaaaatgtgtttttaactccccgtgtaacattgatatttttcctgataaatctgggaggcagtacactacagtgcctttgggaccatattaaattaacaatgacatattaaattcctgattgccatggcaaatgtaaattctcctgcctacaaaaagattgattgaaatttgcatatatgaccgggcgcagtggctcacacctgtaatcccagcactttgggaggccaaggcacgtggatcacctgaggtcaggagttcaagaccagcctggccaacgtggtgaaaccccatctctactaataatacagaagaattagccaggcgtgcatgcctgtagtcccaactactcaggaggctgaggcaggagaatggcttgaacccatgaggtggaggttgcagtgagccaagatcacgccattgcactccaggctggacaacaagagcaaaactccatctaaaaaagaaaagaaaagaaatttgcatacacatacccttctattgctgcaaggaccttcagtttattgtgtgtggctgtcatgttaaggagtgacttggggtatgtgaagcaatagaaatgagaactaaaactaagagaactaatgaaggagaggaacatcaacaaatgtggctgatcttggattgttagttgaaaggagcagttacattttagcttttgtacttgaagcttaagtacttctttctttttgctttgcccatctatactaattatccatcatccccaaaagatttaactttattaatccagtgttaaaagcagggatccataaatggagttttaattcagaaatatcctactatagcccagtgtttccagcataatgaattcactatgtaattaaaagtttgattaaactagaacctacaaaaatatcatgtttctgaactaatgtccatagatagactcaaaggtcacccagtactctctatagcttagatatattcaaataatttactatacacttttccaaagcaaagcaaaaaaaaaaagcgttatttctatggttataaaagaagcgtttatctgcttgaaaaaattgcaaagtctgtgtgagtggggtctgtcgtgggtcaagctgcaaagatccggcctgcatctaccacaagagggcagtagcactcaaccgttaatagggaacccagcagagcgctggaggctcattagaggaatcgttagagccggtcgttaacgcatcaacctctggaaaggacagggaaacaggaaccaccgtccagacactttcggagcttctgtctcggtaacaataacacaggaaataagcaacagggtcttgtgaaagacagcgacctcgctcaccatccccgtgtcgttgaatcaccatggagatggcgactagcttaataatggcttgcagatgggcgtctgctcacgtggatgttcagataagaacactgtggcaggggtcaaaggaacagagctcttcatgggcattagggaagggcggaagaaaagctgaggggagcagcagagctgttttgtctccgaaaataaggacttttaggagtgtcctagggtgaattttatttagcttcatagcattgaaacattatctttggaaacctgtatcatttaccttgcagggtttccaggaaactaattaacagaaagagagatgaattggccgagcgcggttgctcacgcctgtaatcccagcaccttgggaggccggatcatctgaggtcacgagttcgagaccagcctggccaacatgatgaaaccccgtctctaccaaaaatataaaaattagccaggcctggtgatgggcgtctgtaatcccagctacttgggaggctgaggcaggaaaatcgcttgaacccaggagacggaggttgcagtgagcccacaaggtgccactgcactccagcctgggcgacagagtgagactccatctcaaaaaacgaaacaaacaaacaaaacaaaacaaaaaacagaaagagagatgaattataacaaatgcaccttcaatattttaagtatgtatgtcgattggtctagtattgctcataaaatgagatgaatcaggtattttgaatgtgatctcatgaccagcatctgttttgtttttattcataattctctctaatgttactgagctataatctggaaagaattttagtatttgagaaacctaattcattattccttaatttaatgtttcaatttaacatttattgaacacttataattgaatgagaaaagacaatgccagggtggtgtgtgtgtgtgcgtgtgtgttaaaacagagaattttagaaaattaattggatccacgctttaaagtcagcttcaaataaaaattgagacttgtgaatgttttccacattttacgtgccattcctatcccatattataccttttgttgtatagttccttccaaaccataggacagctaaacctaattcagagaatcttgttcctttgtgttgataaaagacaagaaaataaaatatgttctgcttagcaattctaatagatcattgtcattactgttaataagctattggatagaagacttgatatttaaaagcttttactcaattaaaaaaaaagccaggtgcagtggctcatggctgtaatcccagcactttaggaggccgaggtgggaggattgcttgaggccagaagttcaagactagcctgggcaacataagaccctgtctctattattaaagataatgaataaattatttatttataattataaataaataaataataaagcttgaactcaattataaccaaatggtttactcaaatcagcaaacatgtattgggttaggcactgagttagttactaggaataacagaaatgaataaaatagacttgtggatgagaggcatctgaaagaaagggggtaattattattattattattttttgaaatggagtctcactctgccacccaggctggagtgcagtggcacaatctcagttcactgcaacctccacctcccaggtccaagcgattctcctgcctcagcttcccaagtagctgggatcacaggtgcccaccaccacgcctggctaatttttgtatttttagtagagatggggtttcaccatgttggccaggctgatctcaaactcctgacctcaagtgatccacttgcctctgcctcccaatgtgctgggattacaggtgtgagtcactgtgcccagccggtagttaatatttttgagcaactactctgtgacagatcttcacatatattttctcagcctctggtcccagctacttgggaggctgaagtgggaggatcacctgagcatgggagattgaggctgcagtgagccatgatcgtgccactgcactccagcctgggcaacagggcaagaccctgtctcaaaagaaaaaaacaattcttacaattttgttttatggaagaagaaactgaggctcagagcagttaagtgacaaaactcattggtgtagagccaagatctgttcaactctatatagtctttccattggacagaaccctcatctgttcaactctatatagtctttccattggaccattctgtttgaatattagtcattgactcctgggaaaaagcaacttttatgaatgacagtttaacagttttcaatttaaaaaacttaaaacatataatggtgtgcagttactatatagctttaaataatttttaattaggaaatatttcaaacatgcaagtatagagaataatacctgcatagtcattatgaagctatattctatatccaaccttaacactatatttgagttagactttttaaagaaaacattataggaacagttgaggatttctatctttcctcgatcccactgtcttctcgtctttccctagagataatactatcatgaatttggtattggtttcatgcatgatttcttatttttactatatgctaatgaatccataaataatataatactatcttgcaggttttaaagccgtttaattgtgcccaaaagtacacattattctataacttactttttgtattgaatattttgagatttattcatgaatacaaataactctaattctttgttaactgctgttaagtattccattgtatgactataccaaaatttatccatattcctgtaattacatatttacacaagattctgcttggttttgactcaaaacatatctaatgaactttaatcataatattagaacttataattttaatagtaaagtgcaaaactctccactcttacttttctttttttttcctgatgcagatcattcccgaactgaagtatggaaatttggtaatgttgtcattgaacatctataccactggatacacatctgttcagctctcatgaagataaccaaacaactaaatagtggtattacacctccgttgccctccaagactgacaattatatgtatgcaaaaatgccaggggaaggtttgcaagagaagtgataatggatgataatggaattgatactgtatttaggatcctttgtttgttatcagttttgtttgttaactataaaatattttccattggaaaggggtacctataaatgtcttctgctgctaatatttatctcagcactttctaaacccaaaagtgctacctaagaagaaatttagccaaaaaatacccagctaaggtagccatagccaagtgtatttaagtatgttatagaatatatttgaaagcttcctttcagtttgagctttgtatctgctgtggaactgttatggttgattgggtagttatttttcattcttataaggttcaaagtaacagctgaggatttagaaaacaagaataccaaatagaatacgaaataataaagataaaccaaaagaataccaaataataaagatttttaagaaatggactgagaattgtttttctaatttttcaaagacttatctaaacatcgcctcttccctctctctgcctccatactcttgccttaacaactcaaaagttgcttttggtttttaactttttaatttttaatttttgtgggtacatagtagttgtacatatttatggggtactcaaaagtcattttaatgaacagaaattcttgtgggaaaatgtccatgactcatggaaaaaagaagacacttttttaatgataaaaacctcttcagttcaaaagtacaaaaagaatttatatttgtttaaagcttgtttttatgacaaactttactgctctgtggtgagatttcatctttgcaatagatatctgatgacagagtccagttttaataaaattttgggaaattaaactttattttctttattagattgacaaaatgtgatgtgtccaaatatcttataatttgagattggccgtccctttttaaccttttctgataagagggcagtgttattaccagtcctcctctctcggatgatcacatgccagttttaacctatatgcctgtttcatatttggaagggggctttttagggccttcagagcaacattccaaggaacagtgttcttgaagatattaaactcataaccacatatcctgatggcttcagagcaagtttacagagttcactgtgaatacaaatggcattttaggtggcaaggaaggaaagattttgcagaatgccatgtttgtaaccgttatcctggaaattaaattaactaaatgacttctagcttgatgaaaaatatcatacatttgcatggcactttaacttgaagtgttttcgcatactagcttatttgattcttccaataatctataaagtgggtagtcctgatattatctctattttattttataaatgagttgcccagttcacaacaggcataagaggcagagcggacctagcacataatttctggtttattgcccttgccagcaccctagaaatctcacactttccaactttcttactaggctaatgaccatgctgtcagtcttttgaaaactactttaaaatttgcagccaaacaagccagatcggttaaatttattaaataatcattcaagtaaaatactgtcccttaaccttaggagcttatattttgagtgaggaggatgttatttatacctgatgaaggttagatacagatttatatctaaatccatttatttcgctgttaatagatttatttatttacttatacttacatatgcttcagaagcttggacttgattaactgaatttgttattggctctttcctgatagctcataggtaacaatgacactgtacagtgtagaccatccagaccactttctctcctttgctttcttttttatttttttaagtgacagggtctcgctctgtcccctaggctggagtgcagtggcttgatcatagctcactgcagccttaaactgctggactcaagtgatcctcccgcctcggcctcccaaagtgttgaaattacaggcatgagccactgcgcccagcttcactttcttttatacttttggcttgtcatggctcaggaacaacatgaagtatcaagataatgacaatggagtctcaaaaaagctccaattgcctttttaaacagctttactaacatatccacataccataaaagttacccattatagcgtagaattactttttttttttttgtatattcacagagttgtactacccttaccacaatcaactttagattttttttttttttttttttttttttgagacagagccttgctctgttgcccaggctggagtgctgtggtgcatcttgggtcactgcaacctcctgggttcaagcctcctgggttcaagcgattctcctgcctcagcctcctaagtagctgggattacaggcgccggccaccaagctcggctaatcttttgtatttttagtaaagacgggttttcgctatgtttgccaggctgatctcgagctcctgacctcgtgatccgcccaccttggcctaccaaagtgctgggattacaggcgtgagccatcgcgcccgctgaaaattttgatcatcccaataagaaaccacatacccattagcagtcactccccactttcccctacccccagccctaggcaaccgctaattttttttctctaccgatttgcccatctggacattttgtatacaacatgtggtcttttgtaattggcctcctattccctctttttttttttttttttttttttgagacagagcctcactctgtcacccaggctggagtgcagtggtgcaatgttggctcactgcaacctctacctcccgggttcaagtgattcttgtacctcagcctcccaagtagctgggatgacaggcacacaccatcacacctggctaatttttgtatttttagtagagacaagtttcaccatgttggccaggctggtcttgaactcctggcctcaagtgattggccccctcagcctcccaaagtgctgagattacaggcgtgagccagtgcacccagccaattccctcttaatctaaatatgcttaagcgaccagatgccctgaacttctagacattctcaatcttctaactcagaagaccatttgaaggtaatttaagaattgtgcaggccaggcacagtggctcatgcctgtaatcccagcactttgggaggctgaggcgggcggatcaaccgaggtcaggagttggagaccagcctgaccaacatggagaaaacccgtctctgctaaaaatacaaaattagccgggcatggtggcacatgcctgtaataccagctactcgggaggctgaggcaggagaatcacttgaacccgggaggtggaggttgcggtgagctgagatcgcgccattgcactccagcctgggcaacaagagcgaaactccgtcttgaaaaaaaaaaaaaaaaaaaagaattgtgcattcctctcatatatgaggttttatgcaatgccagtcccaaaaacctcaccccacatcatcaatgccatattcttactctccttccacagaatcttgttacaaagacctctctcaggatcagaaaaagtaactattggatactagacttcatacctgggtgatgaaataatctgtacagtgaacccccatgacacaagtttacctatataacaaacttgcacatgtaccccgaacctaaaagttaaacaaattttttaaagcaaaaataaaaattttaattaaaaaacctctctcaactgacaagatcagtgaattaaatattacctatttcacctgttttctggttataaatatagctcaccactttgcaagaagggccattgtgaaccatctttggtctagaatgctgtccagttccataatctttttcttggtcaaatttgttaaatttataaataaataaatattgcctaatttctctgcccttaaacttggttactaccctcagtaggtgtaccatttcctagtcattaaccgtatttaacctctcctccatctactgtctgagcttagactgtcctgcccagggacttcaagtgatgaggcaaccctgggtggccattacgtgactgactctgtagctacagttgtttgaattaggggtgaccccttaccaaagtgagaccaatttgtgaaatggcctaatataaaaagcacccaaaccatggacaagccaaactgggaaacagcaatgggagcagtgtctaaaaggaaattaaggccgggtgcggtggctcacacctgtaatgccagcaatttgggaggccgaggcgggtggatcaccaggtcaggagtttgagaccagcctggccaatatggtgaaaccctgtctctactaaatatacaaaagtagccgggcgtggtggtgcatgcctgtaatcccagctactcgggaggctgaggcagaagaattgcttgaacctgggaggtagaggttgcagtgagctgagatcacaccactgcactccggtctgggcaacagaatgatactccatctccaaaaataaataagtaaataaataaataaaaaataataaaaatttaaaaaataaaaggaaattaagtgcttagagaggccaaaggtgtcatgacaggccttgaaggaagttggtgcatactgccttcaagatgctacaagttagcagaaactataggtagagaaaaggtgtgagtagttggttggggaaaagattgggtgcaaagagaagaaactgaaagtagtgaagttaacattagtaacactagtgtcaaaagattaagtggaagatccaagggtttcggtaatggatccaatttagtcaactgttctgttctggaagtttaagatgattggaaatttctgttgtataacatccatgaggatggtagtgatgatactatcttttactggtttacccagcttgtccttacagcatttcttgttaaagtttcaaaagttgggttctaaaatgttaagaggcttctctgtgcccttactcactgctgcagttaccaccactgctgcagactctacaacactgcatctgagaaactgtcccttctagcctagggaaaatcccatgactgcttcattaaaatgtcccaaaggcaatggaagaatacagaatataacaattgaaaaactcaaattatgtaggatattgagttctcccctgggtaattatgggtaactaattccccattcagtctattcaagcaagaggcaggcagccctggcagggggctttattttttactctttattttaagcaaagtaacacatactcataaaaagtcattctgttatacaaggtctgttgagaccacagcatttcccagccccaccttacctttattttccttgcttctgagtcagctactttcaattctttttgctcaggagttggtaaacagcccattggccaaatctggccagctgcctggtatggtaaataaagttttattggaatagctatgcccatgtctgtggctgctttcacattaccagggcagagttgagtagtggccacaaaaaccatatgggtcacatggactaaactatttgctatctgactgcagaaaaagtttgccaacccctattttagctgtggttttgacatttacctctatattgttaaattacatgcttgtgtggctacttttgtttttccgatttaggcaatatctattaatctcccagtatacaatacaaagatttagctccttcctcagcatatatacacacacgcttcccatccattcttcccaatattattacatggtaatgtaatcagaatagatcaatattcagtgtttatattatcatgattatgtatgctatttacagcttagccatgttgtaaattacaattattttccattcctgtacatccttttgctttccctagagttaatgtcaaaagaaaactggagtgctataatatcacacaagtagatttcagagcaaagaatattataatgataaaggttatttgataatgaaaagtcaattaagaagacattacaatcttaaacctaataacagagcttcaaaatacatgaagctaaaactgatagaacttcaagtctatagacataaaatatttacctaggactgggggatttggaggaaaataggagtgactaataggtatatggtttctttgttgggtattaaaaataatctaaaattggccaggtgcagtggctcacacctgtgatcccagcactttgggaggctgaggcgggtggatcacctgaggtcaggcgtttgagaccaccctggccaacatggagaaaccctgtctctactaaaaatacaaaaattagctgggtgttgtggcgggcgcctgtaatcccagctatttaggaggctgaggcaggagaatcgcttgaacccaggaggcttgaacccaggagcttgcagtgagctgagatgcaccatagctctccagcctgggaaacagagcaaggctctgtctcaaaaaacaaaaacaaaactaaaattgattgtggtgagggtagtacaactatgactatactaaacatacaacttgactatactaaaccccactgaattgcacactttaaatgaatgaattgtatgatatgtgaattatcgctcaataaaactttttaaaaatatttttaaaaatattatactagatagaaatctgaatctatacaaagacatggaaacaccagaaatgataaatatgtgggtaaacgtatttttcctattcaaaaaaatctttttaaaaaccaagttactttttatagcaaaaataatttattgtgcatttatgacatagtgacaatagcacaaaactaggagataaaatggaagtatacttttctaagcttcttatactatacacaaagtggtagattcttactttaaggcagattgtgataagtttaagacatatattagaaaccctaaagcaacagcttatataacaagcaaagaagtatggtcaataaaccaacaaaggaggctgaagcatgaaaatcataagctgaatcacagttgggaaaaatagaaaacaaatagcaatcatactttttttttttttttttgagatggggtctggctatgttgtgcatgctggcctcaacctcccaaagtgttgggactacaggcctgagccaccccacccagcctgcaatcatagtcactttaatgaaaatgttttaagcatccaaattaaatggaagagactgtcagactggataaaaaagcaagacccaactattttctgtcaacaagtgatccaatttgaatgtaaatacacaaatagattaaaatgggttgaaaaagatacactatgctagcattaatcaaaagaaagctagttatattgatagcagaccaagcagacaaagaagaataaaggaataaagagggccacttcttaatgctatagaggttagtagaggttaatgcaagagaacgtaacaatcctaaatgtttacatacctaatttcaaaatacacgacacaaactgatagaattgaaaggagaagcaaattcgcaattatagttggagatttcaacatccttatctcagtaattgatctctttggctgctctgagactagctgggaatgaaccaagagtgaatgagtgcacagatgtgggcagagttttcaaaaaggtatcatatatgggccaggcacggtggctcacgcctgtaatcccagcactttgggaggctgaggcgggtgggtcacatgaggtcaggagtttgagaccagcctggccaacatggtgaaaccccgcctctactaaaaaaatacaaaaattagccaggcatggtggcggacgcctgtaatctcagctactcaggaggctgaggcaggagaatcgcctgaacctgggaggcggaggttgcagtgagccaagattatgccactgcactccagcctgggcgacaagagcgagactacgtctcaaaaaaaaaaaaaaaaaaaaaaaagtatcatatatgatcctgattcctatacccaatggcccgtgaacagtattattaataattttggtccttgggccgggcgcggtggctcatgcctgtaatcccagcaatttgggaggccgagtcgggcggatcacccgaggtcgggagttcgagaccagcctgaccaacatggagaaaccccgtctctactaaaaatacaaacttagccgggcgtggtggcacatgcctgtaatcccagctactcgggaggctgaggcaggagaatcgcttgaacccgggaggcggaggttgaggtaaccgagttcgcgcctttgcactctagcctgggcaacaagagcgaaactccgtctcaaaaaaaaaattttttttttaataataattttggtcctatgtaaggtattattaatacacagattttcatttttcgcctaattatcctgaaccagttaaagtgaacacttggaagggggtagggggaatatcgatagccatggcagtggttttcaaactttatcagaattacccgctggttaaaattcagataactcgcttcactccaaagtttctgattctgcaggtttggggtagggcccgagaatttgtcattttaacagtatctccggtgttgctgatgccgctggtcccagaaccacacactgcgaacaactggcctagaacgttgtcattcctttctcctacagattttgaggcagccggtgggctccgaaacaaaacagaggtcactggatccgattcccagtaccatagaagtgactcaaaccagcgattcaaccgacaagcaggatccgggccacccaaagccgcgcgagagtttacgtgacgacatcggcgtcagcgtcacggaggcgtcggccacgttcagcggacacgggagcaagatggcgattccgggcaggcagtgagtgatccgggagttagggtcaggctgggggatgagaaactacggcgactgtatctttggccgaggagttttaaatgcgctggaagtgaagggactgtgtcgtcaagggtagagacgggaaaaaacgagaagtcctgaggaacatagattcccctcccccgtacattttcccggatggaagcccgaagtttgagggagaaacttgtgaggaaataaaggaagttaggctgaggggcagagagcgagacttttctattttccaaaagctcggtctgaggcccctcagtcttgcttcctaacccgcgcttgagtttctccccgcttggatgctctcaggggcagtgtgaagagagacagttcctggcttccttagagggccttgttctccttggcagaagctcaagtcctgattcccgcccttccttctcgttttaggaatattgttctgagaagccacagaaaaagggtaggcatataggaaattggggtatacgttgccgcaaaagagacaaatactgtacgtacttgaaagttttacctttgatgtgtaatccttacttttgatgcggcctcccgtgatctccgcatcttaaaggccaaaacgtgagaaactaaaggagttggatctgatgggatggttctctcagatgctccgaggcaaagcacatgatcttaataaagtgtaatgcgaacttgccccatggctacttgggtttctcagttatcttttaaaaattttcgtgagttacactatccagtcagttcttagaaactgtgtaagtacacagtaggaaaaaaaatctagccattttcttgactgtttagaccacaaggatagttgaaagcattttaaaatctttagtggacatgaactaaactttccactacacatgttttttttttttttttttaaatgttactgtcacttcgccatcttaaaacatttctgaacttttcatttacttctcttctttgataaaaatggtattcgagtttggcccgtgtccacaaatgatcacttagagtagtaattatagaatcttacggcatgttagaattttgagatcactgagaagcaaaaacagtctgttacgtgttcataaagcttatgacatgttttgatttggtagcttcatgtggaagaggtagtagatgtatttgttaacatttaaacataaaggtttaatttctatttcaaaaaaaatatatgcaggtatgggcttattttgccaaagaaaacacagcagttgcaccctgttttgcaaaaaccatcagtgtttgggaatgattctgatgatgatgatgaggtaaggaaacctatgttttactcgtgcatggttggaaatgtaaattttttaaaaattgaacttgtgactctgatacctttgcctttgttatttgtcagtacagtggagtataatttacagaattgtcaaaaaggaaggtgtaaagaaagcagctccaccgattttttaaagatttttttccctctaaaagctgcaaactttacctttaaacaaatacacggtcttttcagactactgaaattgtcataacaaaattgttggtgtaaagatccctaggtatgagttattaagatgtcaccaattttctacaaatttttattagcaaagcagtttttaatttgttaaccatgagctaagatcactatataacagttcttaacaacgctactttttttttaaattcagtgtctgccaaatgtaattgctcagttataatcgtggtagtgaatagttactcttgatagtactacagtaacatctaatatcaacattttctattttagcagccaaaactacttctgtgaaacccacagttatatatcagaaacaatcccaaatgtgtgcttttcttttctctttttttttttttttttgaaacagtgtcttgctcagttgcccaggctggagtgcaatgccgcgatctcggctcactgcaacctccgcctcctgggttcaagcgattctcttgcctaatcttcctgagtagctgggattacaggcacctgccatcatgaccagctaatttttgtatttttgtagagacagggtctcaccatgttggccgggctagtcttgaactcctgacctcaggtgatctgcctgcctcagcttcccaaagtgctgggattacaggcgtaagccaccgcacccagtaaatatgtgcttttccaatactcccatcatgttttaatatttttttttctttttttttttgagacagagtttcgctcttgttacctaggctagagtgggatggtgcagtcttggctcactgcaacccctgcctcccaggttcaagtgattctcctgcttcaatctcctgagtagctggggttacaggtgcctgccaccatgcctggctaatttttatttttttatttttttgtatttttagtatttttaatattttttgtatttagtagattttcctgcctcagcctcctgagtagctgggattacaggtgccccaccaccacgcccagctaatttttatatttttaggagagacggggtttcaccatgttggccaggctggtcttgaacctaacctcaggtgatccacttgccttggcctcccaaagtgttgggattacaggcatgagtcaccatgcccagcctcttttttttgagatggagtctccctctttcgcccaggctggagtgcagtggtgcgatctcagctcattgcaacctccgcctcctgggttcaagcgtttctcctgcctcagcctgctgagtagcagggattacaggaacacaccaccacgcctggctaattcttgtgtttttagtagaggtgggatttcaccatgttgatcaggctggtctcgaactcctgacctcagatgatccacccaccttggcctcccaaagtgctggaattacaggcatgacccactgtgcctgaccggttttcagtttttattatataatagcatgggtggataatttaacatatttgatatttctttgctacttttgaagacattggctctttatggctcacagtttttaaaaattgaggtataatttacatataaaatgctcagattttaagtgtacagcttgatgatttttgacaaatgtatatgccccaatcaagatttagaacatttccctctctcccaaaaggctttccataccctcctgcagtcagtctacctccccacttgctaccccagacaaatgctcatatttctatcactagattagttttgcctgttacagaatttcatataaaaaaaatcatacagtatgtactcttttatgtctgacttactccactcagtataatgccagatttatccatgtagttgtagaatcacatttttcttaaaatggattttttcccccttaacagtgacttaagtttttcttccatttttctgtttttatttcttcataaaatattagaataattgaccataagaaatgaatcaaggttactagttaaatctccatttctgcgtagccaactagaatattttcaaatggaatattgaggaagttactaattacaacttttgaatttttaattatgtcgttgcattagtagatatttaatacctacaataggttaagagttgatcagttttgcatctatatagcctatatactttttattatgtggtacgctttaacagttttttttgggaccttatatagtgttgctttcaaccagtgtctagtctagtggggaagacagacatgtgaacatgaatataaagcaaactgaaatatgaaaaggaaactaatatactgaggattcctgtgtgctcattatactttatttgatcttcaggatcactctgatgtattattattcccattttacaggtcagaaaattgaagctcaggttaagtaatttgttcaaggccatgtggctgataaataagtgtcaagattgggatttgaacacaggcctatctgaccttcaaacctatactattcttctgtcttgccttgttttaacagtagcgttacagaatgtgaatgaaatgtagagaatgaaatgattcactttgttgcaggaaaatcaaggcaggaataagcatttaaataacattcaaggctggtttagatttaaataggcaaaaatagaggtgaaataatttcatttgggagagaacagcaagaaatacagaatggcatacaagtacaaggcatttttgtggaataatgtggctggagaagagggtatataggaaaaaatgttgcagatacggttgtaacaggattgggccagattgtggagtaccttaaatttttcgtataaaatttcaactttatattttcaagtagtttttgagtaattcggtgatatcatcacacttttgggaagataactcttgaattgtaaaacaaagaaagggagaaatgagagatgagtttaaaaatgcttgttagaaggcttttttagtagttcaggtgagagatctcaacctaggttgaggtcattgggaattaatggggaaaaatgtgagcgataccacagaaataagtaggacctggcagccacattgaatatatgggaaagagatggagtcctgatgcaagatcttttttttttttttttggtcatcattttccctcattaaaaaaatatataattcacacactgtatactttacccttttaaagtgtacaattcactgtgtgtgtgcgtgtgtgtgtgtgtttttttttttttttgagacggagtctctgtcactcaggctggagtgcggtggcgtgatctcggctcactgcaactgcaacctccacctcccgggttcaagcaattctcctgcctcagcctcctgagtagctgggattacaggcacctgccaccatacccagctaatttttgtatttttagtagagacggagtttcaccatgttgatcaggctggtctcgaacccctgaccttgtgatccacctcgcccggcctcccaaagtgctgggattacaggcgtgagccgccgcgcccggccaattcactggtttttaagagttgtgccggcatcaccactgtttagaacattttcctcacccagaaagaaactgtgtacccattaccatcactccccattctccccacccctaaaccctggcaaccactaatttactttctgtttctatgggtttccctattctgcacatttcatataaatagaatcatgcaataggctttcttttgtgtctgacttctttcacttagcatgatgttctcaagattgtaacgtgtcagtactctttatttctttttttattactgaataatattccattgtatgaatgtaccatattttatctatcagtggtaggcatttgggtttttcccaatttctggcaataatgctgctataaatacttgtgtataggttttttgtgtggatatgttttcatttccattggatattctattggatatgtacctaggatggaaatttctggttcatatgataactctggtttcatatatatatatatatatatatatatatatatattttttttttttttttttttttttttttttttttttttgagacggagttttactcttcacccaggctggagtgcagtggcgtgatctcggcttattgcaatctctgcctccctgtttcaagcaattctcccgcctcagcctcctgagtagctgggattacaggcgtgtgccaccatgcctggctaattttgtacttttagtagagacaggttttcaccatggtggccagcctgttcttgaactcctgacctcaggtgatctgcctgcctcggcctcccaaagtgctgggattacaggtgtgagccaccacacctggcctggttttattttttgaggaactgccagactttttcaaaatggctgcaccattttgcattcctgtcagcagtgtatgagggttttgacacttccacatcctgtctaacatttcttttttattgtagccatatagaaggtgtacagtggtatctcattgtggctttgatttgcacttccctggtggccaataatgttggacacttttttgtttttggagaaatgtatattcatgtcatttacctttttttaaaaaaaatttaaaattgagatggggtctcactatattggccaggttggtcttgaacacctggcctcaagcaatcctcctgcctcagcttcccaaagtgctgggactacaggtgcaagccactgttcccagccacatttatctctttttattttattttattttttgagacagagtctcgctctgtagcccaggctggagtgcagtggcacgaacttggctcactacaacctccacctcctgggttcaaccagtttccctgcttcagcctcccgagtagctaggactacaggtgcagctgggattacaggcatgtgccactacgcccagctaatttttgtatttttagtagagacggggtttcactatgttggccaggctggtctcgaactcctgaccttgtgatctgcctgcctcagccttccaaagtgctgggattacaggcatgagccaccgtgcccggctttacctctttttaaattgggttgtcattttattatggattgtaagagttcctttagtatcttattagatatatggtttgtaagtatattctcctgttctgtgggttgtctgttcacttttcttgaaaatatccttcgaagcacaaaagttgttttgaggaaatacattttttgctgctgttgctggtgctttagtgtcctacctaagaaaccattgcctaatccgaggtcacaaagatttccactatgttttcttctaagaattttgttgttttagtccttgagtttaggtctttcatacattttgaaattttttttttttaataataagagagagggggttcaacttcattcatttgcatatggatatccagttgtcccagcaccttttgttgaagactgtttaccattaaatcgtccatcgtctatttaccattaaattttctagcacccttgtggtttaatatacaaataattataaaaatcacttactatggatacaacagaaggattggacatgcttatcttgcatttcacattaaagcaccctggtatactgtgtaacacaaagcatcatggccaggcatgataactcatgcctgtaccctcatgcactttcggaggctgaggtgggagaatcgcttgaggctaggagttcaagtccagcctgggcaacagcgagaccccgtctctataaaaaaaaaaaaagtgtggtggcacgcactggtaatgttaggtacttggaaggctcaggtggggagaattgcttgagcccaggtttgaggttgcagtgagctaggattgtgctactgcactccagcctgggcaacagagggagatcctgtctctaaaataaaaagaaaaagcgatatgaaatgaccacaacataccacagtttgagaaggatgggtttacacaagtaatctagagagttttttgatgttactgctgtttcttttccattgtgaaatgaggctggtgttagctagccagtgggtacactagagtcagcaaagataggcctgggccattttgtgctagctttctccttccctcctgctcttcctcttttcctccttcctgtagtgggactttaatacagagaattgttaacataggtgatggaagacttgagatgccaaaaagggcatgatgaggcagtcgagagattagcagcagtaagaagcaagtagtgatatatagagggatacaagtaggagatggttcttggaggctggggaccagagttacctggtgggaactgggcttgtccagaaggagcagaaacatttgggagattcagtcttagagagaaaggttctcctaccttccggtcaaagccaatggacaagggagctgcagcttatttcttagtgaacggaatataaaaccattccttagaataatttccttacctataaaaaaatcagtctggttaattccagcttgtctttttactgagaagtaaatttattgagtatatttaaatatttgtgagatttggccagtcatggtggctcaggcctataatcccagcactttgggaggctgaggtgggcagatcacttgaggtcagtagttcaagaccagcctggccaatatggtgaaacaccatctctactaaaaatacaaaaattagctggacatggtggtgggcacctgtaatcccagctactcaggctgaggcaggaaaatcacttgaaccctggaggcagaggttgagtgagctgatatcaagccactgcactccagcctgggtgacagaacgagactccgtctcaaaaaaaaagattaaaaaaaaatttgtgtgatttgactatatattaaaatctctttcataattagtcaacaatttaagcaacaattaaattattagtgctgtggaaaatatagaagaaagataatttcttattcccctcctgaggaaagcatttgatacacctggaaaggagctgctatgaagccaatttatctgttctttttatcaattcagcagcatttaagatcagattttttctctagtggtccagcagagggagccctagcacatgaattgttttcattttgtgcttgcatccagggttagtttagtgggaaagtggtagtctatcccttttaattataatttaagcagttcctcctttcttttttgagacagagtctagctctgtcatccaggctggagtgcagtggcggcatctcgggtcactgcagcctccacctcccaagttaaagcagttcttgtgcctcagcctcccaagtagctgggatcacaggcgttcgccaccaggcccagctaatttttgtattttttgtagagatggggttttgccatgttggccaggctggtcttgaactcctggcctcaagggatctgcctgcctcagcctcccaaagtgctgtgattgcaggcgtgagccaccatgcgtggcctagtagatcctctttttcaaattgtcagaataagttagaaataattatcattttgttcaaggtgggagagatggttgggggggtggtgaaagtttttacaccatatgagtaagaaagcatattctgatgctgctatcaattcataagtgagtggttttgctgtcataattttccggtctcactgtcaccatgttcattcttttctgttggattattttaattgtttcataactagtttccttattatctgtcttctcaaattatttatgatattgtcagattgatcttcctaaagcacagttataatcactgatcctcagtcctgaacgtaattatatttaaaatctaaagtgctaatcttgactttgaaaaccttctctatgctttgcccctagaatgcttactagcattttctcctaactgttcctccataaaaagtacactgtcgtgcttgcagtttttcacagctctgcttttctttacactggaagtcttctccccatttttttaatgtccaaattatagccatccttcaaaacccagcgcaaaagctacttctttcaagataccttctttgattttcctcactggaaagaatctcttcctttttcttacactctttacctttcttattgcacttagcttttaaaagcttgcattataagttgtttacatacatgtcttgtcactgtactagataaagtatgagctctatgagttaggatctggccatctagcctagcttcgtatttattttttgaaacagagtcttgttctattgcccaggctggagtgcagtggtgcgattttgggtcactgcaacctccgcttcccagcctgagcaatcttttagcctccgcctcctgagtagctgggaccaccggtgcgagacaccactctcggctcatttttgtatttttttgtagagacagggtttcgccatgttgcccaggcgggtctcaagctcttgagctcaaagtaaaacgcccaccttggcctcccaaagtgctaggattacaagtgtgagccaccatgcctggcctaggctagcttctaaaaattagtaagattatttattcaggtgttttagctgtctgtattgtaaagatccagatagtaaatgttttaggccttgcagggcaactgtacaacttcattctcagtgtgaaagcagccattaggcaatatgtaaattatgagcatgagtaataaatgtgttttaataaaattttatttacaaaaatggagatgggctgtatttgacccatagcctacaacttgctgaccactggtctgtatgattgttctcaaaagtatttttgataacagatatttaatgagtgttaagtgaccaagatggttagatgttgcatgacagattaaacctagaactgttttttagatgtttatctatgataaatgcctgcccattttgcagagcataatgaattttccttttaatgtcggcaattgaaatgtttatttctaaacaatggtatacttgtgaaatctagttttgtaacataatttatatgccattaagagatacgatgtatagaatctgaaaattgttgcactttttttggagacaaggttttgctctgctgcccaggctggagtgcagtggtatgatcacggctcactgcaacctctaccttctgggctcaagtgatcctctcacttaaacactccagtagctggcaccacagggatgtgccaccacatctggctaatttgtttattttttgtagagacagggtctccctctgtttcccaggctggtctcagactcctggcctctagtgatccttgtgcctcagcctcccaaagtgtcgggattataggtgtgaactactgtaactggcctagttgttgcttttggataaagagacaaaactttttaaccactttaaaagagagtattaagtttagatagctaaaatttattaacttagttttacattttatttaatttacattacttattattttttttcattttttgagacaggatcttgctctttcacccaggatggagtgcaatttgtgcagtcacaactcatggcagcctcaacctcccaggccgaagcacgcctctcacctcagcctcccaagtagctgggaccacaggcacacaccaccatgcctggctaattttttaatttattttttgtagagacagagtctcactgcgttgcctaggctgctcttgaactcctgggctcaagtgatccacctgctttggcctcccaaagtgttgggcttataggtgtgagccactgcacctggctgtgaacttagtatgtgtatatatgtatatgtagttatatatatatataaaattatatatataaaattactcagaagccatagtatattccttttataggttaagcatttatagaaattataagggaaacattaaaaccctagcagaaaaaaaagaggaaaacacatttagagacaaatatagaaaaaatagaaatatctaatgaacattaaaaatactcaattttactataagaaatgtaaacttaggacaatagtgagctaccattttttgccatcatattagccaaatactttttaaaaatgaaatggcaagatctttgtgaaattgcactcgaatttttgttataaattaatgcacatttttggaagcagatggaccttttctggaaagcaattccaaaaattagtataaatcttttaaaagttgactattgtttacccaatattatcagtcaggagacagaaaccttgccaatattttcttttctaaaattttgtcttggaattgtcagaaattgatataatatatttttaggtattcaaaagcatttatcttgggtctctttatgatcgtaaaaatttaagaccagtccagctttcaacagtgaaagcatgagtaagtaaagtgtgtgcaatactacggctatcacattcatcatgaaataacatttagtgaaaaaatatatacaaatttgttatagataaaaggaaaaaagacaataaagcatttcatattaatggtagttatctttgtatggcagacaatgagtggtttttttgtttttttttttttaatttgtagagatgggggtctcgctatattgcccaggctcattttgaactccaggcctcaagtgatcctcctgctttggtgtccccaagtgctgggattacaggtgtgagccaccacgcctggcatgatttttttttttatacttttctgtattttcaactattttttaagaaaaattatggtgaattttaaggatttcccatagtgtatttagtttccaaatcatattaaaatgtaaaaagatataacacattttatctgatagaagactaggagagaaaatattgggacattttaaaagcatgaggtagatgaaataaggatacaaaattgaatacttagggttgtacaatgctataggtgcacagataagtaaaaaataataaatgaaaatgattactttttagcatggtagtgtgagttttttttcaaaatcatattattattttgttataattttgacgaatacaaggaagtgagtgcttaaaaaaaaaaagataaccataattgtgtattcccaaagtaagaagcattagcaagttacaggattacataagtgtatacacttccattcctttcactatttcttgatatttctcctctttaatctttttaaaaattttcttgaaaaagtaagttgaaggtttggttttcctaatgaaaaattaatcttattttagctggaagcctgtttggcttactattggtaagaaaaagttaaaattttaatctgtctgaacattatagtacatccaaatcaataaaatgttttagttgtggtttttcatcagttttaatcagataatgccttacttctgtagatatagtctagtatagttcaaataaaaagacagttgtacatagataagacaaagcatattgtgaaaatgttgggaaatttaggttattttaatgatggctgagaatttgtgaacttttctcatatgctattaaactgaattactagtaaatttatggtaccgagtatatcaaacagtgagggatttaaagtaattttgcaatttgctaaaatttcatccttaacatactggctaagagtgaaaaagcaagaagagagaaaaggaaaaggatggaactaagacaattctattagaagtggggagatggcaagaaaattctgtcctccttatttttctttttcttttttaaaatatttcattttgagacagggactcactgttgtccaggctagagtgcagtggctctgtcacagctcactgtagcctcaacctcctgggctcaagcaattctcccacctcagcctcccaagtagctgagactacagtcatgcactaccatgcctgcctaatttttttttatttttttgttgagacagagtctcactatgttgcccaggctgttctggagcccctggcttcaaatgatcctcctgcctcagcctctcaaagtactgggattagaagtgtgagccactatgcccagcgtccactagtctttttaaccattgttttccatttctgaggtctttgacttaatttcatagtttttcaacatgtgctcattggggcattatttcttaagtttttgattgttaaataatgcttgcccattgcttttgtcacttaaatatctacttgattgggtgtaatatttctacaataacaatttatttcaaaatcttacagacattagtgattttttctggtacttaatgttcttatgaggaagtacaacactatagtttcttttatccctacttctagactttttttaattggcttggactactggagagtatatagcctttttaactcaatgtgtcttgctgcaaataatgttgaattgttttttccaggaatacactgtttctttttctctaaatatttagctttttcttcatttcattgaaatttactgtcatccatgtgctgggttatcattttggaggatcatctttgtctttcatatcatcgtcatgcatttattaatgcattcaacagatatttattgatcacttgccctgtgccagtgaaacataacaaaagccactgcctttatggcacttatattctcaaggtggtggtggtggggggtgataagtaattaacataacagataagtaagttacatgtgaatttagaagattacagagctgtgaaaaagtagagcaggataaggaaaattaaacaggtatttagggaaattactcagtctatgtctttttctctctactaagattaaacttttgtcagtgtttcagttatagcttttctgtttcttactgtttctaatttattagctctattggtgttattttagtcttcaatatattttctttagctctacagtttctctgtcttttattgtcctctcatctgaatagtaacttttaaaatttaattagtaatcttattttgaagagtttgacagggaagagagagaggaagagatggaaatgatagttcaaagatacacaggtatacctcactgatattgtgggtatggttccagaccactgcaataaagtaaatatctcagtaaagcaagtcatgtaagttttttgtttcctagtgtatataaaagttatgtttatgctatgctgtagtttttaaagtgtgtaatagcattatagctaaaaaaatgcctataccataattttaaaatactttatgctaaaaaatgctaatgatcatgtgagcctttagccagcaataatctttttgctggtggagggttttgtctcaatgttaatggctgctgactgatcaggtgatgtttgctgaaggctgggtggccgtagcaatttcttaagacaaaaatgaagtttgctgcattgatcgactcttcctttaatgaattatttctcggtaacatgtgatgctgtttgatagcatttacccacagtagaactttaaaaattggagtcagtcctctcaaatcctgctgctgttttatcaactaagtttatgtaataatctaaattctttgttgtcatttcaacaatgctcacgtcgtcaccatgagtagattctatataaagaaaccagtgcaaggccaggcgcggtggctcacgcttgtaatcccagcactttgggaggccgaggcgggcggatcacaaggtcaggagatcaagaccatcctggctaacatggtgaaaccccgtctctactaaaaatacaaaaaattagccgggcatggtggcgggcgcctgtagtcccagctactccggaggctgaggcaggagaatggcatgaaccagggaggcagagcttgcagtgagctgagatcataccactgcactccagcctgggcgacagagcgagactgtctcaaaaaaaaaaaaaagaaaagaaaagaaaccagtgcagtggctcatgcctataatcccagcactttgggagactgaagtaggcgaatcacctgaggtcaggagttcaagaccagcctggccaacatggtgaaaccccgtctctactaaaaaataaaaaagttagccagttgtggtggcgtgcgcctgtaatcccagctactcagaagactgaggcaggagaatcatatgagcccaggaggtggaggttgcagtgagccaagatcatgccactgcactccagcttgggcgacagagcgagactgtctcaaaaagaaaagaaaccattttctttgctcatccagtagaagaaatttgtcatcaattcaagttttatcatgagattgtcatcaattcaagttttatcatgagcagttcagtcacatcttcagactccatttgtaattctagttctcttgccatttctaccccatctgtagccacttcatctactgaagtcttgaagccctcaaagtcattcatgagagttggaatcagcttcttccaaactcatgttaatgatgtttggcctccacccatgaatcacaagtgttcttaatggcttctagactgttgaatttcttccagaaggttttcagtttacttgcccacatctgtcagaggaatcactgtctgtggaagctgtagagtttatgaaatgtatttttgttttttcgagacaaggtctcgctttgtcactctggctggagtgcagtggtgcgatcttggttcactgcaacctctgtcgcctgggctcaaacgatcctcccacctcagtcagcctcctgagtagcatgggccacaggcactcaccaccacacccagctattttttttttttttttttttttggtagagacaggggtctcaccatgttgcccagtatggtctcaaactcctgagctcaagcaatctacctgccttggcttcccaaagtgctggggttacaggtatgagccaccacacctggccttgaaatgtatttcttaaataagccttgaaggtcagaattactccttgaaccatttgctccagaatggatagtgtgttgataggcctgaaaacaacattcatctccttgtacatctctgtcagagctcgtgataacccgatgcattgtcagcagtattttgaaaggaatcttttttttcaagcagtgggtctccatgacgggattaaaatattcagtaaaccaagctgtaaacagatgtgctgtcatgtaggctttgttgtttcatttatagagcacaggcaagtagatttagcataatttttaagggccctagcatttttcaaattgtcaatgagagtcagcctttgaagctttgaagccaagcgttgacttctcttgggctttgaaagtcctagatggcatcttcttccaatagaaggctgttttgtctacattgagaatctgttgtttattgtagccactttcattgatggtccctgttaggttttctggataacttactgcagcttctaaattggcttaagggaacattgtggctagtttgatcttctcttcagactactaaaattctctccatatcagcaataaggctgtttgccttcttatcattcatgtgttcactggagtagcaacttttaatttccttccataacttttcctttgcattcagaacttgactgtttgactgcaagaagcctagctttcagcctgtctcgcctttcagcatgccttcctcaatcagcttaatcatttccagcttttgatttaaagtaagaaacctgctactctttctttcacttgaacacttaaaggccattgtagggttattagttgacctaatttcagtattgttgcgtctcaaggaataggaaggcctgaggagagggagagaggagagaggaaaacaccggttggtggagcagtcagtcagaaaacacacaacatgtatcagttaagttacccattttatctgggcatggtacatggcttccccaaacagatacgttaataacaccaaagattgttgattacagatcattgtaacatgtaataatgaaaaagtttgaaatattgtgagaattaccaaaatgtgacacactgacatgaagtgaacacatgctgttggaaaaatggcactgatagacttactcaatgctgggttgccacacatcttcaatttgtagtaaaacatccgtgaagcacaataaaacaaggaatacctataatggtacggtcattgtaattttcctttttgttgttgtcttaggatagagataatctgtgcaggtttcagctgaaagagaagcagctaaggaaaaatgagagattttacagctaaggaaactagggtgtcaagaagttaactggtcaatagcacacacagggtacttagataatagagctaaattttgaattcaggtctgcctgattcaagtccatgcttttaaacaatgtaatgtactccctctgagagttagtttgttcataatggaatttccagagtttcagagaatggatttcagaaacaatagaaaaagggttagtaggggactggcaaagatcaggttgacttcaaagggtcaatcttgtttattatttggaaagggaacacaaatagaagttgtgttcaaatgtgctttttatcatgtgaaattacacaactttgccttccagtgacctaggaatattttgaggagattaggctatatttaattttcaacaaaattgacatcccattgtccggatatatatatatattttttgaacagtctatcccaagggttttcaatgggtatgctgctacttcaagaggaaattcagaaatttgtggagtggcttttacttatcataattgttttatttctttctttctttctttatttgagacagggtcttactctctctcccaggctggagtgaagtggtgcagtgacagctcactgcaacctctgcgtccaggactcaagcgatcctcccgtttcagcctgctgattagctgggactacaggcacgtgccaccatgcccagctaatttttgtattttttttttgtagagacaggatttcaccatgttggcccaggctggtcttgaactcctggggctcaagtgatctgcccacttcggcctcccaaagtgctggaactgtaggtgtgagccaccatgcctggcgcttatcagagttaacttaggtagggtgttgttggcaccagttttttgttttgttttgttttgtttttcagacggagtcttactctgtcacccaggctggagtgcagtggcgcgatctcggctcactgcaagcttcacctcccgggttcacgccattctcctgcctcagcctccggagtagctgggactacaggcgcccgccaccacgcccagctaatttttttgtatttttagtagagacggggtttcaccatgttagccaggatggtctcgatctcctgacctagtgacccgcctcggcctcccaaagtgctgggattacaggcgtgagccaccatgcccggtgttggcaccagtttttgatgaggaccggggtggtagatactgtgcatctcatgcccccattcatataggtgaaatccctctaaacatgcatatagatgaaaaactgcttattttattttatttcatttttttgatcatggcccactgtagccttgatgtcccaggctcaagtggtggctcatgcctgtaatcccagcactttggtaggccaaggcgggtggatcacctgaggtcaggagtttgagaccatcctggccaacatggtgaaaccacgtctctactaaaaatacaaaaattagctgggtgtggtggtgcacatctgtagtcccagctactcgggaggctgaggcaggagaattgcttgaaactgggaggcagagcaagaccctgtctcaaaattaaaaacaaaaaacaaaaagagtattgggtatgatacaattgagaactaccagtctgggctttccccactgacataaaatggctcatttattatatattaaatttccataaatatgtagatttgtttttttggactattctgtttcattgattttttttctttaatcctggttcaataccatattatttcaattactctagcattataatctcttttaatatatgataggacaaagaataagaaaagctaaagtttattgagtactttgtttatgttagatatggctttacgtgtttgatatgaattatctcatgtaatcatgttaattggtttaccatattttatcaaatctaagctgctttgatattgatgctttcttggtgttaccagaaagtgtcaatgaaaacttttcatacagaacatcattattgcttcctgggtgacagcatttttttaataagtcattgatttctgagagattaaaatatgaagaatctgtgttttagaatcagagaaataagatgtcattattctcattttatagttgaggaaacaggcagaaagtttaaataacttgcctgagattacacagctaattgacttaatatcccatatgattgattgggatcttttaaagttattacattttctaagcatttattgctgatacacagcagtagtaattatacacacacacatttgtacatacatcatattttatgtatatatctaaggattttttttgtatgtggatatagtatctgagcaccttgctaaactcttctattacttgtaataataggttaaaattctctggattttctgagtaggtaatcatagtacctgaaaatgattttaatactaattttttttctggtctaattgcattgagtagaacctcaagagtattgttgaaatatagtggtaatagcaggcatccttttcttgtttctgaccttatgaagatatttctaatgtttcatcattaagtatgctattcatgctaggttcatggtaaatatcctttttcaaattaagggagtttctccgtattgtagatttgtcattcacaaatcatcttatttacaactattcggcaatcctctctactgagtttatctctataatagagtccttctaccaggtgcacctccctgtgagagagtatacttcctaccttcttgatatcaggcttagccatgaggcttgctttagccagtggaagtgatgtatgctgtatctgagcaaaacttcaggagtcattgcttgattaagtcattgcttttctcccctctgccatatgaacaatatgttgcatataggtactgtgccttcagcttcagtcctagaatgaagacagtgaggagccacagccgtccacaatggacatgtagcatgagcgagaaataaacctttgtattgtaagccttgagactttggtgatgtttgttaacacaggatcaattctcaaaattaaccaataactttagttgctaaacattttaattagggattgaattttgtcagctcttttttcagcatctgttactattgtgaattacattgatagatttttttcaaaagtgaaaccactctttaaaatactaggataaactgtacttagtcttggtgtattattctttaaatgtgcaactgaattttatttgctgttttttaaattgtaaaatatgcataacataaaatttaccatttaagcattaagtgtgtagttcagtagcattaaatgcatttacactgttgttcaactattaccatggtctattttgagaacttttttatcttcccaaactgaaagtgtatactcattatataataactccccttcccccagtgccctgcccagcccttagcaaccaccattctactttgtgtctataaatttgaccattccagatacctcatatacgtggaatcatatagtatttgtctttttgtgacggggttatttcacttagcataatgtcctcagggttcatccatggtatagcatgtgtcagaattttcttctccattgtatatgtgtatcacattttgtttaatctgttcatccatgcctggaccttttggctgttgtgaataatgctgctatgaacatggctgtataagtaaccatttcatttcctgccttcagttcttttgagtgtacaattgtcccttggtgtccttgggggactggtttgaggtccttcctcccacagatatgaaaatctgtgaatgcccaagtccctgatataaaatggcatagtatttgcacataacctatgcacgttctcccatatactttcaatcatttctggattacttgtaatacctaatacaatgtaaatactatgtaaatagttatactctattgtttagggaataataacaaggaaaaaagcctatacatcttcagtacaggcagtttttttttccaaatattttcaaaccatggttggttggatccacatagatggaacccacagatacagagggccaactgtatactttggggggtggagggggaattgttggatcatatagtaattctgtgtttaagtttttgaggactgtttcagtcttgaggaaccaccacagtggctgtatcattttacattcctaccagcaatacacaaaagttccaatttctctacatccctaagtcacagcactgggtattgactgttttatttgataatagctatcctaaggggtatgaagtggtatctcaagtcttagcgttttttttttttttttttttttttttgagatggagtctcgctttgtcgcccaggctggagtgcagtggcccgatcttggctcactgcaagctccgcctcccgggttcacaccattctcctgcctcagcctcccgagtagctgggactataggcgcctgctaccatgcctagctaatattttgtatttttagtagagacggggtttcactgtgttagccaggatggtctcaatctcctgacctcctgatccaaccgcctcagcctcccaaagtgctgggattacaggcgtgagccaccgcacccagctatctttgcccattttttaatccgggtttttgtttttgttgagttgtaggagttcttttttcagtccgttatccagatatatgatatgcatatattttctccttttggtgggttgccttttcactctgctgaaagggtcctttcctgtacaagtttttaattatgctgatccagtttatcaatttttttgttgcctctgcttttggtgtcatatctaagaaatcattaccagatccagtttcattaagttttctgttttctttcaagagttttatagttttagcccttatgtttaggtctttaatccattttgacacaaaatttttgtgtacagtgtgtttgctattaagtcgcattggcctgtagttttcttgtgctgttctaatctggtgttgattttgctctccctcttttttttttcctctaaaacaatggctctacaggtgtgaaatgggggtagtccttgggagttacttaggatctgcaaaaacaaaactttttcacaggaatactgagacactatttgaggccgggcatggtggctcacgcctgtaatcccagcactttgggaggctgaggcgggcggatcatgaggtcaggagatcgagaccatcctggctaacacagtgaaaccctgtctctactaaaaatacaaaaaattagctgggcgtggtggcagccacctgtagtcccagctactggggaggctaaggcaggagaatggggtgaacccgggaggcggagcttgcagtgaaccgagatcgcaccactgcactccagcctgggtgacagagtgagactccgtctcaaaaaaaaagacattatttgctttttactctcatagtctcacaagtatttggtgttttccagaggctgcttacatgtaatattataattgaacatagagcacatacgagaatccagcaatcatttgttaacagatttgcaaaaatacaaaatacttccacttttctaatttttttgaaactagttatttttcacaagttttgtaacctttgataagaatgtcgttagcatgaaatgggttattttatagtgaattaataacttaaaattttctcttgtaatttccactgtggtaaatattgacagctaaacccatgcatgtaaacaaaagctgtttgggtactcaataattttaaagagtataaaagagaccaaaatatttgtgaacctctgttttaggacagttaacagaaattttgttaaaatgaaaggtaatatatttggaattggtccttcactatttcagtttctgattttttttaattgttcagattttacttttttttttttttttttttttttttgagatggagtcttgctgtgtggcccaggttggagtgcagtggcgtgatctcggctcactgcaacccttgcctctcaggctcaagcgattctcctgcctcagcttccctgagtagctgggattacaggtgcacaccaccatgcccagctaattattgtatttttagtagagacagggtttcaccatgttggtcaggctggtctcgaactcctgacctcgtgatccgcactccttggccgcccaaagtggtgggattacaggtgtgagccaccgcatccggccccagattttactttttcagctaattttggttatttacatttatttagagacagggtctcactgtgtagccaggacctcctgggctcaggtaatcctcccacctcaacctcctaagtagctgggattacagcatgtgacaccacatctggctaatttaaaagaaaaaattgttttgtagagatgaggtcttgctgtgttgtccaggctggtcttaaacacctgggctcaagcagttctcctgctttgacttcccaaagggattataagcatcagccaccacacctggctagaatcagctttttgattattcattgtccgctgtcttttagttttctattttattacttttttcttttatctttattatctccatataatcttcctttgatattagtttgttgtcttttacaattaatttttttctaagaaatttattaatagctgtaaattcttcttcagtgctgcattgagtgcatgccacaggcttttatttagtgaccacattgtgtattttttagacataatttgtaatttttgttttgattctgtttttaatataaaacgtttagaattaggcttttaattttcaaatatttggcctttttcctccactttttgctgttaatcctaattcattttgtctataaacatgtccatggcccatgtgacttctgtttttttgtagtttttttacattttcttagtatcttaataaatggtcacattttgtgacaattcatgtatgtttgaaatgaatgttttccctgttttctttaaagtactatatacctttacatacatatgtacgtttgaatatgtatttgtgctttgttaattggcacaaacaaattggttatcgtgacaatttttaaaactttaaaaatgtgaatatcggctgggcgcagtggctcatgctggtaatcccagcactgtgggaggccaaagtgggcggattgattgagctcaggagttcaagaccagcccgggcaatgtggtgaaacctcgtctctactaaaaatacaaagaattagctgggcatggtggcccgcacttgtagtcccagctacttggaaaactgaggtgggaggatcgcttgagcccaggaggtggaggttgcagtgagctgagatcacgccagtgcactccagcctgggcaacagagtgagactgtctcaaaaaatttttttaaatgtgaatatctttaggtggggcatgctctctttgattagctgtagtttcttccactccctactgtattacaagaggctgtgtatctctaccttgcaaacaatttgtgtatctcgtccaaccttaattcttttattcacatctatatcctttctcactggtctacatgatttttataagtgtggtgtggtagttttccactatggttatagtattttaaatatctcttttgaaataaggtttttttaaatgtatttcaaaactatgttaaatatgtaaagactcattacttttttaaaaatgtattttatttttttagagacggggcaggggtgggttttgctttgttgcctaggcaggagtgcagtggctctatcatagctcactgcagcctcgaactcctgggctcaagtaatcctcccatctcagtctccagagtagttgggaatataggcatgtgccaccacgcctggctaattaaaaaaaaaaaaaaagtcgtagaaatgaagtcttgctatgttgcccaggctggtttggaactcctggcctcaaacgatcctcccacctcagtctcccaaagtgctgggacctcacccgacctaagtattagaaatagtgtatcttaagtgtttagtccagtgcataacacagaagtgcaataagtggtagctatattgctgcaataataattatatctgtgcagtaattactattcatcattagtggtctgaaagtttcctgtgttgtctccatccgactttgtttttgactgtcgtatttgatatcctggcttttttgtgaccttttaatagaatcatgattgcaaatttgggtttgtggccattcactacgtaccattatattagaaaaattccataaataaggcagttatgtccataattacatttttgagttattgttttatttggtttgtgtacaatctcattgcactctttttactcaacctgtttgacaatttctaattggaagataatgtaagctttacttccaaatttatgaagttaaataacaaaattagctttctgtttctccaaaatcatacacatctgcttccatatactgacaggctttgatattacccattccaactttaccataaaagtcattaaaaagaagtttttcctttattttcatgttgtgtttcagtgtatgttgtcagacagaaagcaataatccctcatctcactcctgaatttatcaaaagctggaaataaaatagatcaaatcactttctgaaacaaaattactttattagtttagtaataatttgaggttactttaaagataagaagcagcatttggaaggagattcatttcctgcctttgggctttatctgcaagaagtacatctttagtgtcaagagattgtgtatttataactgaactctaataaaatctgtactggggaccctgcacacctgacttggtcattgtggttatatattaggtgccaaactattgcttgtctcttgaaaaaaaaatacattgccaagtgtttttcattaaaatttgccctgtgtagaaaaggttataagacctttgactgttcattataagtgtgctagttgttaccaacatagttaatgatgttccttttgaaaataagtttgtgtttctaactgaaacaaacttacggagtttttcttttattggttaattaagcaataattggaaaacatgtcattaattctagtatatatgttttcactaaagcttattaaatatttgcatttccgatagcacagtagggtgactagtcaataataatttgtatattttaaaataaagaatgtaattgaattgtttgcaactaagtataaaagcttgaggggatggataacccattctccatgatgtgcttatttcacatggcatgcctgtatcaaaacatctcatgtaccccataaatgtatacatgtaccatgtacccacaaacattttaaaaataattttttaaaaattataaatatttttctaccactatttttggctaacgttacagaatattgaaaactgtattctgattttttttccctttaatcagtattttagactatatgcgagtgtcagggaactataccgttttccttatgagcaatctaaaattaccctcctattcacaacccgtttatgcttctcccaccttttgctgtggtttttgttttttgttttttaatctcagagaaattgtcacgcaaggcatgtaagattattattattattattattattatttttttttgaagcagagtctcactctattgcttaggctggagtggagtggcacaatcttggccctctgcaacctctgcctcccaggttcaagagattctcctgcctcagcctcctgagtagctgggattacaggcatgcactatcatgcccagctaatttttgtatttttagtagagacatggtttctccatgttggtcaggctggtctcaaactcctgacctcaggtgatctgcccacctcggcctcccaaagtgctgagattacaggagtgaggccactgtgcccggcaacataagattattttcgaactgcatccttcatgacatttatatgtgtatttgcaactgtatgtgtatgtatatgtatagacacacacatccctatgtctatatagatatatctgtctttctggaagtacgacatctcttttacaaaggaaagaactgttatgcctatgcatacaatacacttcttttttgaaacatgttcggagaattgttagtcatgctcctcatttcaaggcgcacactcctatcatcagcctagcctgcacaaagctcttttcttctttattaattttcctcttctgatcccctctcattcccctttaaatatatatatgtgctgcttggatatccgtgtttgatatatgtgctgatgtgtttgacatatgtgctacctggatatctgtgtatacttttaaattatattttgttttgagtacatatgattttgtaaacataaatgttactgcattatctcatttttttagtcaacactgtgttacagtatgtatacctagttaattgtttttaactacagcatatacgtctactgtattttatctatcccattccttctgagataaacacttaagttaccttcagttccctgctaccacagtgatattattttaaaaaattctcatacatgtcccagtagaaacccttgtgaaagtttttatggggatatatattcaggggtgggatttctagatcatagggtatgtatataaattattgcactaaggccgggcgcagtggctcacacctctctaatcccagcactttgggaggccaaggtgggcggatcacgaggtcaagaggttgagaccattctggccaacatggtgaaaccccatctctactaaatatacaaaaattagctggacgtggtggcgtgctcctgtagtcccagctacttgggagactgaggcaggagaatcgcttgaatccgggaggtggaggttgcagcgagccgagatcacgccactgcactccatcctggcaacagagcgagactccatctcaaaaaaaattatttcactaagtactgataaatcactttctgaaatggctttatcagtttacattttcattggtggccactgttgtttttctcatcagccgtttatttatttacttttttttttggagacaatttttacagtaccatccacaaatagtggatacattttttcctgatttgtgggtcatcttcattatgttgtatttccgtatatccgtgaatctgctgctaagctttcctgttttatttttatatgttgctgtgccaaaacatagtttgttttgttttagacaaggacccacactgttcctcaggcttgagtgcagaggcatgaccatggctcactgcagcctcgatgtacggggctcaagcaattcccccacttttgtcttccgagtagctaggactgcaggtgcatgccaccatgcccagctaatttttgtatttttgtaaagttggagttctgccgtgttactgatgctgatctcgaactcctagcctcaagcagttctctttccttggcctttcaaagtgctgggattacatgtgtgagccactgtgcttggccaaaatatcgttttttaaattattgtagcttagtatatctagttgagtgagccccctactctacacttctttttcaaacttgatcaaactatttgtggacttttattgttatatagataaagtttgtgaaattccttcaaaattaaaactcttctgagatttgtattagaactgccttggatttataagttatattagtctttaaggaactacatgtaagtgtggtatagttcttccttcatttagactttttaaattttaaatagaaacagggtcttgctatcttgcccatgctggtctcaaactcctgggctcaagtagtcctcccacattggcctcccaaagtgttgggattacaggtgtgagccaccacacccctcctagactttatgaggtaattttttaccccattaatgtcctgtgccttatctgcagtttaatttctagatacttcctacattttgtagctattgtgagtggtaccatattttcaggaatatatatatttttaagagtcttgctctgtcccccaggctggagtacagtggcgcaatcttggctcactgccacctctgcctcccgagtagctgggatttagaggcgtgcagcaccatgcccagctaatttttgtatttttagtagagatggagttttgccctgttggccaggctggcctcaagcagtctgcccacctgggcctcacaaggtgttgggattacaggcgcaagccaccacacctgagcctaatcagatttactgtaatagtttgtttaaaccatctgcttcatctcttctagtccttatacctctttttcctgttttactttattagacaagttttcagtagtatgttgaaaaatgtccttagtgggcattctgacctgtctatcctaagtgatatcctaagcttctgaagtttttccattaagtttgatttttgttattggcttttggtatatagactttttctttttcttttcttttctttttttttttttgagacggaattttgctcttattgcccaggatggaatgcaatggtgcgatctcggctcactgcagcctccacctcctgggttcaagtgattatgctgcctcagcctcccaagtagctgggattacaggcctccgccaccatgccccagctaatttttgtatttttagtagacacggggtttcaccatgttggctaggctggtcttgaactcctgacctcaggagatctgcccaccttggcctcctaaagtgctgggattacaggtgtgagccactgcactcggccagacttttgtttgtttggttggttggttttgtttgttttgttttgttttgtttgagatggagtctcgctctgttgcccaggctggagcgcagtggccaatctcggctcactgcaagccccgcctcccaggttcacgccattctcctgcctcagcctcctgagtagctgggactacaggcgcccgccaccacgcccggctaattttttatatttttagtagagacggggtttcaccatgttagccatgatggtctcaatctcctgatgtcgtgatctgcccgcctcagcctcctaaagtgctgggattacaggtgtgagccagtgcgcccagccccggccagacttttttaagttaaggaactcttctattcatcactgaccaactttttttttttttttgagacggagtttcgctcttgtccccctggctggagtgcaatggcgcaacctcagctccctgcaacctctgcttcccgggttcaagcaattctcctgtcccagcctcccgagtagctgggattgcaggcatgtgctaccatgcccagctaattttttgtatttttggtagagttggggtttccccatgttggccaggctcatcttgcgaactcctgacctcaagtaatcagcccgcctcagcctcccaaagtgttaggattacaggcgtgagtcactgtgcctagcctgacaattttttataaatcacaaataggtactaaatgccttcctgaatttattgagctagttaagtcatttttctcctgtggttcattaatatggtttattagattgatacatttttaaatgttaaaccattcttgaatttctggcttaaatccttttgagcaggatgtattatttttaatatgctagtaaactcaattcactaaaacttgatttagggttttcaaacatctatgtctataagtgggaaaggctttgtttattgtctaaaaatgtctgtaggattttaatttatggaggtgacaaatgacatattgagactaatgccctttaaaagaagattattgttatgtacatttactgacaggagaagacatgccatttcattcagggctacatagggaagaaccagtttggatcaggaaaagcctggttcagagtctttattgtatttttcatgggaaaggaagggaaacagtttaggattggctagtttgaatcttgtcagttgcctctgggctgtagcggtgatcaccagtttttttgtatctggccctgggcaatgaaggcagaggactattgcttcctggcttgtaggggccagaggagatggttctaagtttgggctgtggattggctgatttacagtttttggaatatgtatctgttctgcccaggttttcagatttaattgttcacgatagtgttttttaaatctttcatctactgttacttgcatctctttacttttcttgattaatcttgccaaaagtttgtctatcttataaaatcttttgaaataactagcctttgattttgttcatctatattttgttgatttattctctaatttctgcccatatgtttattgcttccctgggttattttgtcaatcttcctaagtttctttttgagtactattttagctgtatctcacaagttttggcatgtagtgttttcagtgttatacatttataaatattttgtaatttcctttatgatttgtttaacctgaagacttacaggtatagcttttagttttgacatacaggtttggttttctcaaggatatttttattgccgtttctattcttttatttaatttttacttaaaaaaatagagatggggtcttgctgtgttgtccgggcttgtcttgaactcttggtctcgagtgatcctccaaccttggcctcccagagtgttgggattacaggtttgagctactgcacctggctgctgtttttattcttatgttttattgtgttatgaccaaagaacataagattatctgatgtttatttttattcttgatctatttgttatcatagaggagtaagattgccatctaaaatggttgctgtccttatatttctgagagttgatgctttttatttattcatttatttaaacaactttattgagataaagttcacatagcaaagccaggtgcagtggcctgtaatcccagccctttgggaggctgaggcaggaggattgcttgagcccaggagttcaagactagcgggggaaacatggtgagaccctgtctctgcaaaaaattttaaaaattagttaggcatgcttgtggcacatgcctgtggtcctagccacacaggaggctgaggcaggagcatcacttgagcccaggaggtcaaggctgcagtgagccatggtcaagccactatactccagcctgagtgacagagcaagaccctgtctcaaaaaaaaaaaaaaaaaaaataccaaaagctctgtggtttttagtatattcacagaattgtgcagccatcatcactattttagaatttcatcacccagagagaaacctgatcattagcagtcactcctaattcttccctctactctgcccttggcaatcactaattgactttatgtctctacagatttacctatttgggacatttcaaataaatggaataatataatgtaatacatgttgtagagatctttttttttctttttttagatgaagtcttgctctgtcgcccaggctggagagcagtggcgcaatctcggcttactgcaacctctgcctcccgggttcaagcagttctcctgtctcagcctcctgagtagctgggattacaggcaggcaccaccatgcctggctaatttttgtatttttagtagagatggggtttcaccatgttggtcaggctggtcttgaactcctgaccttgtgatctgcctgccttggcctcccaaagtgctgggattacaggtgtgagccatcgcgcctgaccaatatgtggtggttttttttttgagacggagtctcgctctgtcacccaggctggagtgcagtggcgcaatctcggctcactgcaagctccacctcctgggttcacaccattctcctgcctcagcctcccaagtagctgggactataggcgtccgccatcacgcccggctaattatttgtatttttagtagagacggggtttcaccgtggtctcgatctcctgacctcgtgatccaccctcctcggcctcccaaagtgctgggattacaggcatgagccaccgcgcccagccgttttttgttgttggttttttttttttttttttttttttttggaatctcgctctgtcacccaggctggagttcaatggcgcgatctcggttcactgcaatctccgccttctggattcaagcgattctcctgcctcagcctctggagtagctgggattataggtgcccgccaccatgcccggctaatttttgtatttttagtagagatggggttttgctgtgttggccatgctggtcttgaactcctgaccttaggtgatctgctcacctcggcctcccaaaatgctgggattacaggtgtgagccaccacacttggctgtttccacatctttatgagcatttgtgactcttttattttagtcatcctgttgggtacgaagtggtatttcaatgtggttttgatttgcatttccccagtggctaatgatgttgagcaccttttcatgtgctttttggccatttgtatatcttctttgaaataaatttgtatttcttctttgaaaaaagtgttcaactcctttgtccattttttagtttgtctttttattgttgaattgtaggaattctttatgggctgcaagttccataacagatacatgattgcaaatacagttgattcttgaacgataggggggttagagctaccaacacccgtgcagctgaaaacttttgactaccccaaaacttaaccaccagtagcctattgttgaccagaagcctcgttgataaacagctaacacactttttatatgtattatatactgtattcttacagttaagctagagaaaagaaaatgttattaggaaaatcataaggaagatatataataaaatatatttcctatttattaagtagaagtggatcatcataaaggtcttcctgttcatcatcatcttcacattgagctagccgaggagaaggagggattggtcttactgtttctgagtgccagagacagaagaggtggaggaggtgaaaggtgaggcaggcacattgggtgtaacttttacttaaaatctacatataggtgtgcccatgcagttcaaacttgtattgttcaagagtcagctgtatttttttcccattctgtgggttgtcactttctttttttttttttttttttttttttgagacagagtttttcttttgttacctaggctggagtgcagtggcgcaatctcagctcaccgcatcctccgcctcctaggttcaagtgattctcccaagtagctgggattacaggcatgcgccaccacgcccgggtaattttgtatttttagtagatacagggtttctccatgttggtcaggctggtctcaaactcctgacctcaggtgatctacctgcctcggtctcccaaatggtgggattacaggcgtgagccaccacacctggtgtgtttgtcactttcttgatggcttttgaagcaacaatttattttgatgagatttgaaataattttttttttttaaaacagagtctgtctctgttgcccaggctggagtgcagtggcgcgatctcggctcacggcaacctctgcttcccgggttcaagcgattctcctgcctcagtctctcgagtagctgggactacaggcatgcaccactgtgcccagctaattttctttttagtagagacagggtttcattctgttcgccaggctggtcttgaactcctgacctcatgatctgcccgcctcagcctcccaaagtgctaggattacaggcgtgagccaccgtgcccagcctaagaatttttttttttttttttttggtcatttggacttttggttttagctacacagattttgtcatgtgtctaattcaaggtcacaaagatttacttgtattttttcttctgtgagttttatagctaaatgtaaacgtttagattaactccatttgagttattttttgcaaagggggtaaggtaagggcccaacttcattcttttgcatatgtatatctagttgttccagcaccatttattgaatagactgttctttcccctttgaattgtcttggtgttgctttatttacttggaagatacattgttaaaagcataaatgtttatgattgctatttcttcttgatctgttcctcagtatctggtaacctactttgttcttcacatacgtttctctttaattctatttttctgattttataattactatcaagcttttgattcatatttgccttttgtattttttcccactcatttattttcagctttttttttttttttttttttttgagacagagccttgctctgttgcccaggctggagtatagtggcatgatctcagctcactgcactgcaacctctgtctcccaggttcaagtgattctcatgcctcacctctcctcagtagctgggattacaggcgtgcaccaccacaccctgctaatttttgtatttttttagtagagacggagttttgccgtgttggccaggctggtctcaaactcctggcatcaagtaatctgcctgcctcagcttcccaaagtgctgggattacaggcataagccaccgtgcccggcctattttcggcatttttatatcctgttgtatttaggctctttttgtagacctcctatttctagatcttttaaaaatccaatcccagagtttgttgtctttttttctctctctcatttaataggttgaattttcttttcctagtttgaaatgtacacatttcattgtgtttcagttaaaattttggtcattatcccaaaccaatctatgcttacatttatacgtttggtttcttttattgttgttataagtatctttatatcactcactgccttcaacataaataccttggcacactctggctaccttctggttgtcttctctccctctcttccacctgctgcttgccttgccactgtgtttatatcatccagatgaggtgttggcaaactatgtctcatgttggcatccttttttaaaataaagttttattggaacacagccttgccatttgtctgtctgtggctacttttgtgctacatgactagatgcaacaggccacatggtccaccaacctgtgtattcaccatttgtcccttgaggaaatttgctgacccctgctctggatctgtgctaatatgatagccagtttagtcttagaggctgttttagcttaagtaaaatttaaaaattagttccttagtcacattagccacatttaatgtgttctatagccacgtgtgactggtggctaacatattggacaacacaggtaaaagatattttagtcatttcagaaagttgtatagccctgctctagatttcgtcctggattgttatggttgttttttgtcttattttaaaagataatattagggccaggtgtggtggctatcacatgtgctgtaatctcagcactttgggaggccgaggcaggaggattgcttaaacccaggaaggagttcaagaccagcctgggtaacatactgagaccccatctctacaaaaaataaaaaaataagccagatgtggtggcaggtgcctgtggtcccagctactcgggaggctgaggcgggagaattgcttgagcctgggagcttgaggctgcagtcagtcgtgattgtaccactgcattccagcctgggcaacacagtgagaccctgtctcaaaaaaaaaaaagatatattaagttttactaagttatatatttacctttcatgtatctcataatattattattgggagtacaggttgagtatccctttctgaaatgcttggggccaggtgtggtggctggcgcctgtaatcccagcactttctgaggctgaggcgagaggattgcttcagccctggagttcaagaacagctgggcaacacagtgataccctgtctctacaaaacactaaaaaattacctgtgtgtagtggtacatacccgtagtcccagctactcagaggccaaggtaggaggatcgcttgagcctgggaagtcaaggctcctgtgagccatgatcgtgccactgaactccagcctgggcaacagagtgagaccctgtctcaaaaaaaaaaaaagaagaaaagaaaaagaaagaaatgaatgcttgggaccagaagtgtttcagatttcagattttttcagatttgggaatatttgtattatacttaacagctgaacattcctaatccgaaaatccaaaatgcttctttgagcatactgttgacactggaaaagttttagatttgggattgttggattagggatattcagcctgtacttcctttattttcaaagagggcttttatgaggcagacctgagattttatgtgcttaaaacatctttagttttgatgatagtttttctggatatatactttttagttcaaagtgctttccatcagcactttaaagttactccatctgggtaatgttaattaagatttactacctttttttttctttttaatttttgtgagtatgaagtaaatgtatatatttatggaatatgtgagatattttggtacgggcatgtggtgcataatatggattacttgttcttaaatcccaagttgctgatgaggtatttgatgacattccgattgtacccctttataggtgacctactcttccttgttggaaactcttagaattttctttttgtctttcatttccttaaatttcattataatgtatctagttgttgtatatgcaggcgtgtgtgttttatttatcctctgtcctcttttgcattcaaaacctgttcaatatgatatttttctccaattctagaaaattaccagtcattcaaatatttctttgaatctgtttagtttatatgtcttcctctgggtcttctgttacataaatatctttcatatcactatacctttttttgctttgtttttaagagatggggtctcactatattgcccaggctgaaatgcagtggcatttcatgatcatagtgcactatgcctcaaactgctgggctcaagtgatcctcttgcctcagcctcctggctgtagctaggactacagacgtacaccatcgtgtggcttttttctttttttaagcattttaccctttccatgtgtgttctaggagtttctagcctaatattctaacttattaaaacattttttcagctatatccattcattcatttacccatctcttaattttattttatttatttatttattttttgagatggagtctcagtctgtcacccaggctggagtgcagtggcacgatcttggctcactgcaccctccacctcccaggttcaagcagttctcgtgcctcagcctccctagtagctgggattacaggcacctaccaccaaacccggctaatttttatacttttagtagagacagggtttcaccatgttgcccaggctggtctcaaactgctaacctcaagcgatctgcccgcctcggcctcccaaagtgctgggattacaggcgtgagccaccacgcccggcccatctcttaatatttttattttgactatattttccatgtacattatttcaaatagtttctgttgaccttgtctatcaggacaccttgcagtaaatccatcaggaagttgctctactatcggacattagaacttactcctctaactgtatgttcatacctattagtacccattaaccaacctctctttatctctcccctcccccaagtccttcccagcctctgttcactatcattctactctctacctctatgaaatacatttttttagttcatacatatgggtgagtacatgagatagttgtctttctgtgtctggcttatgttactaaagataatgaccttcagtttcattcatgttgctgtaagtgacatgattccattctttctttttttttttgagatggggtttcactcttgttgcccaggctggagtgcaatggtgcaatctcggctcaccgcaacctccacctcctgggttcaagcgattttcctgcctcagcctcccaaatagctgcaattacaggtatgcaccactatgcccagctaattttatatttttagtagagacggggtttctccatgttgatcaggctggtctcgaactcccgacctcacgtgatctgcctgcctcggcctcccaaagtgctgagattacaggtgtgagccactgtgccccgctgattccattcttttttatggccaaatggtactccactgtgtaaatatgccacattttctttgtcaattcatatgtgatggagacttaggttgattccatattttggctgttgtgagtagtgctgcagtaaacataaaagtgcatgtatccttttgatatactgattttctgtcctttgaataaatacccagtagtgatattgctggatcttacggtagttctgtgtttaattttttgaaaaatctccatactattttccataatggctgtactaagttacattcccacctacagtgtatgagagctccttttactctgcatccttgccagcatctgttagtttttgtctttttgataatagctattctaactgggtaagatgatatcattgtggtttggatttgcatttccctgataattagtgatgttgggcatttttttatatacctgttggctactcatatgtattttgagaaatctctattgcccacttttttccccttttattgatatataatttacatatttatggtgtacatgtgagtgtttgttacatgcaaagaatatgtaatgatcaagtcagggtgattggggtatccatcacctagaatgttttatcatttttatatgttggtatcatttcaagccctctcttctaattactttgaaatgtacatattattattgctaagtatggtcaccttagtctgctatcaaacattggaacttatttcttctatctaactgtatgtttgggtacataagaaataagttccagtgttggatagcagactagggtgactatacttcttatagtctttgtctctctcccctctttatcccctctcctcctccccttcccagtctctgttatctattgttctatactctatgtccatgagatcaagttttttagctcccacatatgagtgaggacatgcaatatttgtctttctatgcctggcctatttcacttaaaataatgatctccatttctatccatgttgctgcaaatgacattatttcattatggccaaatagtattctattgtttaacacactttatccgtttatctgttgctgggcatttaggttgattccatatctttgctattgtgaataatactgtggtgaacatatgagagtgtccttttgatacactgatttcttctttggatagatacccaatagtgagattgctgggtcttaatggtagttctaattttactttttgagaaatctccatactggtttatttactaatttacattcccaccagcagtgtataagagttcccttttcttaccagcatctgttatttcctgtctttttaataatagaggttccagctggggtaagatatcttattatggtttggatttgcatttcactgatgattagtgattagcattttttcatatacctgttggccatttgtatgtcttttgagaaatgtctatttcatgtccttcacccactttttaatggcatttttttttttttttgctattgagttgttttgagttccttctatattctggatattagtcacttgtcagatgaatattttgtaaacgttttctctcattcatcaggttgtctcttctgctgagggttttctttgctgtacggaagtgttttagtttaatacagtcccatttatctatctttgtttttgtttcctgtgcttttgggatcttggccataaactctttgcctcaaccagtgtccctggagcatttctcctgtgttttcttctagtagttttatagtttggggccttatcttaagtctgtaatccattttgttttgattttttatatggtgagagacaggggtttagttttattcttctccatgtggatatttagttctcctagcaccatttattgaagagggtattctttccccagtatacgttcttgacacctttgttgaaaatcagttggatataaatatgtggatttatttctggattctctattctgttccattttggtctatgtgtctgtttttatactaatactatgctagtttggttatgatagccttgtggtatattttgaagtcaggtagtgtgatgcctctagctgttctttttgctcaggtttgctttggttattcaggctctttgtagtttcatgcaaattttagaattgtttgttctagttctgtgaaaaatattattggtattttggtagagattgcgttgaatctgtagattgcttttggtagaatggtcattttcaccatattaattcttccgatccatgaacatgggatgtctttccatttttttgtgtcctctttaatttctttcatcaatgttttatagttttccttgtagaggtctttcaccttggtaaaatttattcctagggttttgggttttgtttttagttttggaaatatgattgctttcttgatttctttttcctctagtttgttgctagtatattgaaagttatactgatttttcatgttgattttgtgtcttgcagctttactgaatttgttcattagttttaagaggttttttttgtgtgtgtgtgtagtcgtttggtttttctaaatataagatcatgtcatctgcagagagggacagtttgacttcctcttttccagtttggatgcttttaatttccttctcttacctgattgctttggccaggacttccagtattgtgttgaataagagtggtgaaagtgggcatccttgtctagttccagttcttagaggaaaagctttcagcttttctctgttcagtatgttagctatgggtttgtcatatatggcctttattatgttgaggtatattctttctttttatttttatttatttgtttatttattttttgagatgaagtctcactctgttgcccaggctggaatgcagtggcacgacctcaactctttgcaacctctgcctgctgggttcaagtgactctcctgcctcagcctcccaagtagctgggactacaggcatgcaccaccatgtctggctaatgttttttgtatttttagtagagatggcgtttcaccatgttggccaggctggtctcagactcctgacctcaagtgatctgctcgccttggcctcccaaagtgctgggattatatgtgtaagccatcgtgcccggccaaggtatgttttttctgtgcctagtttgttgaacatttttatcatgaagggatgttgagttttattgaatgctttttctgccccaattgagatgatcatatggtttttgtcttttattatgttgatgtgatatatcatatttattgatttgcatatggtaaattatctttacaactcagggataaatcccacttgattgtggtatattgtccttttgatgtactgttggatttggtttggtagtattttgttgaagacttttgcatctgtgttcaactatggcctgtagtttttttgttttgttttgttttgttttttaatgttgtgcctttgtctggttttggtttcagggcttcacagaatgagttaggaagaattcccttctcttttattttttggaatagtttgaggagaattggtattctttgtaagtttggtagactttggcagtgaagccatcagattctgagcttttcttttttaggagactttttattactgattcaatctcattactcgttgtttgttcaggttttctgtttcttcctgattcaatcttggtaggttttatgtgtccaagaatttgtccatgtcctttaggttttccagtttgttggtgtatagttgtttgtagtagtatctgatgatcttttgtatttctgtagtgtcagttgtaatgtctcctttttcatttctgcttttgtttgagttcttggttggtctagaaacataattttgtaaaatggttttcttgttaaacacttgaaccatcattcttgatcatctggtgtgtagaagacactgtactggatactactggtagtaagtagaaggctgcataagacagatctgtgctctcaaggagatttgttatacattatgaaaatgaatttataggtaattcaagttaaaactaaaatatcttcacttctgagagaagctaaaatttcagaagctgctaaggggctttgttaggattaggggcttttctcattgcgtaaccaggaataaaagacagccttactttgagaagaccataaacgggtgaatggataaacaatttgtgccatgtttatacaatggaaacactacttggcaagaaagaacagacttgatacatgatgtgaattaatctcaaactaattatgctgaaagaagtagataacccccccatacaaagtatatatgtttctgggttttggctattacaactaaactggctataaacatttgtatacaattctttatgtgtacataggctttcatttctcttaggtaaatacctgtgcatggaatggctgggtcgcttagggtatctgtttaaatagtcatttttctaattattgtaaatgtcacttctttcttatactaggtttctatatatgcttgtgttcatttttgtctcttgtctgtggatctgctttgcactgtattagcactattatatatactgttttaatttatgtggctttataatatatctaatgcatattttgggaaaatttttaccctgttgctttcctatggaattgtttcatataaacacatttttagtttatttgcatattcttcaaaacctaaatatttgaatattaaagaaaaatgtggaaaacagaaaattttccttttatgatgagatacagtattgtaagacagttagattatgagaatcttgtcctgtgtatgggatttgagtcatcagtgctgaactgttgaaataagacttgtcaaaaatgatacattcagatccttttggataggaagtataatttttcttttgttcatatttagaaccattctgaaaacacagccatggatgaaatgatctctctgtaacattttctctgtcacatttttatgttgtaagagtatgtctttgcttgccagtataccttgccagggttgagtaataccatttttaaaatatttaccaacatgatagatgataaaagttaatatttttattttcacctctttagttattgctaagattgaacatttttaatatagttaagagtcatgtatattttctcttttctaaattttctcttcatagccatgtctttttttttttttttgagatggagtcttgctctgtcacccaggctggagtgcagtggcgcagtctcagctcactacaacctcctccatctcccaggttcaggtgattctcctgcctcagcctcccaagtagctgggactacaggcgcgtgccaccatgcccggctaattttttatttttttacttttagtagagatggggtttcgctgttttagccaggattgtcttgatctcccaacctcatgatccacccgccttggcctcccaaagtgctgggattacaggcgtgagccactgcgcccagccagccatgtctatttttttctgttgtagttagtgtttgtcttaggtctgagcttatattacataatgaaaatgttagggtactcatcacagcccttaaactttgtacttacaagagttgtgagaatgtggacaaatagagattgctgagttgtaagacttttaataaatgatctgttgctaagtttaaaaaagtaaaaaagaacaggaagttctcagcacgacagaaaattttagctgtgagccatttgaaagaaggattggttcttgaactgtttttgtttagctaagagccattttggataattgggtaggtgcaacttttatttaagaaagaagctcatatgtcccattgtgctttattagttatggaataattatttctacaaaaagaaaaaattcagaaccctttactaaatttttgtgttaaaataaatttattattgaaggaaggtaatttaataatataaataatggtctagtacctatacttttttcaatgtcattagactatattttgtttcctggtgaaggagtaccaataatacagacctaattcccttttttttttgaaatggagtctcactttgtcatccagactggagtgtagtggcacgatctcagctcactgcaacctccgcctcccgggttcaagtgattctcctgcctcagcctcctgagtagctgggattacaggcacgtgccaccatgcctggctaattttttttttgtatttttagtagagacggggcttcatcaggttggccacgctgatctcaaactcctgagctcaagtgatccagccgcctcagcctcccaaagcgctgggattacaggcatgtaccaccacatccggctaattttgtgtgtgtgtgtgtgtgtgtgtgtgtgtgtgtgtgtgtgtgtgtgtgtgtgtgtgtgtttttagtagagacggggttttaccatgttagccagcctggtctcgaactactgagctcaagcgatccaccctcctcggcctcccagagtgctgggattacaggcatgagccactgtgcctgaccctaattcttttctgatggttactactgcccaggaggtaatcgatttaagcttgtatagtgatgcaacaaaggtacatagtcatgtattttctcttcgatttatctgagctaacggtaaagattttttatttttttgtatgtctcccttttaggtcatatctgactgctattcaaaatgaagcaaatattagattgattaaataatttttattctctacacagaacaatgaagggagaaaaaaactaagaaatctagttgcaatgtttttcttaattctgcagtttatggtgcctatactttgaccacttttttttttttttttttttttgagatagtctccctctgtcacccaggctagagtgcagtggcacgatctcagctcactgcaacctccacctcctgggtgcaagcaattctcttgcctcagcctccccgagtagctgggactacaggcgcgcgccaccatgcccaactaattttttttgtatttttagtagaggcgaggttttaccacgttggcaaggctggtcttgaactcttgacctcaggtgatctgccctcctcgacctcccaaagtgctgggattacaggcatgagccaccgtacccggccaatgaccacatttttaccccttataatgtgtatgtgtgtgtgtgcgtgtgtgcgaagtattgttttatgttatttgtgattgtaaaatagaccagtcactttcttcccttttttgtgggttcctttcttatttggaattaaagctaactggaacctactaactcttaagacataaatttaaatgttgaccaaatatggctgctttcctactagattataatctttttgtagcacctagcctaagtgctgtacacatattaggctgtcagcatgtttactgaattaagttaaaacatttggaaggagctactgcttcaggtttttgaaaaggtattttcctgagattttgataaagaacctatcttgaaatattagtgtgttttttgtacttttagaacagttctaatgtttgcatttgaacctatttgtttataagttgattttttttccttcgagataaagtgccttataggaagtaaattttgtctccctaaatttaaaactaacgattttattagaaggcaccattggctgagcatggtggcttatgcctataatcccagcactttaggaggcaaaggcgggaggattgcttgagcccaggggtttgagaccagcctgggcaacaaagcaagaccctgtctctacaaaaaaataaaaaaattagctggatgtggtgacacacatctgtagttccagctactccagatgctgaggcaggaggattgcttgagcccgggaggtcgaggctgcagtgtgctgtcttcatgtcactgcgctccagcctggacaacagagcaagaccctgtctcaaaaaaaaagagaaaagaagccagttttaaggaatattctcctgtgttacactgcaaactggtcctcaggcatagaattaaaataattgtctacctactaattttgaaatgagtcaatgactttattgtgtggtttggtcacattcagccttaatctttttttaaacagctgtttttccctagataacttgtaagctaatatattttgtggcaagaacgaaatgtttttgcgatatttatactaagcaaaatacaaaatacccttgaaagtaatgctggtagaaaagagccaatctcaaaacgatatactgcataattcaatttatttaacattcatcaaacacagagataatggttgccagggattagagatggaggaggaaggatgagtatggcttataaaggagtagtgcaagaagtattgtggtgactagtacaattaagtatcttgattacggtgatagttacttgaagctctgtgttataaaatggcataggactatgcacatacatgcacagatgtgtatgtgtaaaaatggtgaaatctgaataagcagtgtgggtgtaccagtgtcagttccctggtgttgatattgtactctatgcaacttactaacattgggagaggttaggtaaagggtacacagtacttaactgtacatttctttgaagtttaaaaatacgctttttaaaacaagcacttccccttctcaccccaaaccaggacaattattagagacaaacgtctgttcatttggtgtgtccttgtatcttgccatttgattatagcagcacagcagaggataccctcaaaggagaatactccctagtctactcatgttttgggggcagtgtatttttgtttatgaattagttcctactaaagccactatcagttctagaaaacccatttctagttacgctatagctcccatggctaattaaggattcaaatgtatgcatcctccattttcctgtttatggacatactgaatataaaaccttaaagaatcaacacaaaagaaaacatatacagccttttaaatattcagcagaatagatttttctaattcagtggatggaaatatattaatgtcacttcaaataaataccaaccttacattttattaagcacactgataaatatactataaagaggaatattgtttgcatgcttttctggtgaataatccaagaaaaaaaaaagtacagctactgtgttctcataacttagttttgatttgtttaaatataagcatttcttcagccatatatttttaaacaggaacatgataataacaaaaatggtagctaacctttgtgaggtaggtactaatatatagaggaggaaactgaaacaggaagaaattaacatacctagaataacaagctagcaagagagagaacagttgtagactgtttctgagtctacacttgtgaacgttattttgtaagttctcctcatgctgtacagtataggaacactgaagttagagattaataatctttgcagttattatataagttttgttttattcacagggcacttatgaaatctattttttctcttgctgagttcaataagatcaacccttccctgatttatggcaagaggatctgcttttgtgatatttaccttcttgagtatcctttctttttatgaaaaccagactaaattaaaagttctcttaaaatttgtgttagtatttgaaaaaattttatacaagtttatgggatacctgtgagattttgttatatgaatgcaatgcttagtgatcaagtcagtcagcaattagtgtctgttacccaagtacaatacgtttttgttaagggtagtcaccctggccaggtgcagtggctcatgcctataatcctagcactttgggaggccgaggtaggcagatcacttgaggccaggagttcgagaccagcctagccatcatggcagaaccccatctctactaaaaatacaaaaaaaattagccacgcatggtggcgcacacttgtaatcccagctactcgggaggctgaggcaggagaatcgcttgaacccgggaggcagaggtttcagtgagctgaaatcacaccactgcactccaacctgggcagcagagcaagactccatctcaaacaaacaaaaaggatagtcaccttactcttctgtcaaacactgaatatattccttctatcttactgtatgtttgtaccctttaaccagcttctctttatcctccccatttccctcacttacccttcccagtctgttatctaccttttcactctacctccatgtgatcaaagtttttattttagctcccacatggaagtgagaacatacgatatttatctttttgtgtgtggcttattttacttaaggtaatgacctccagttccttccatgttgctgtaaatgatacgatttcattctttttatggccaaatactattctgttgtgtatgtatactgtattagtattttaaggataccactaaaaacgtaaaaagacttgacctttaaaaacataagatctggccgggcacggtggctcacatctgtaatcccagcactttgggaggccaaggcaggtggatcatgaggtcaggagttcgagaccagcctgaccaacatgatgaaaccttgtctctactaaaaatacaaaaattagctgggcatggtggtgtgcgcctgtattcccagctactcaggaggctgaggcaggagaatctcttgaacccgggaggcggaggttgcagtgagccgagatcgcaccactgcactccagtctgggcaacagagtgagactctgtcttaaaaaaaaaaataagatcttactgatctgcttttaattgtagtagttttttttctcacacataaatatatgtatttaagatatttgttaaaaagaaaaatattttcccattcatgatatgactacaatgtatctgaaggaatctgtttttcattgatactatggagtagatgtagaaacagtacttaaaatatcaaatactaaatagactcgtttttcctttaatgttaataacattctgtgttttcattttatgtgactttccactctaatggtcaacagtacatgtacagttataataatacttatgttactctagtagatggaatcatacctcagctttacgttttcagaggaatcatctcagttggtgaatttccaataatagcaacataggacaccgttcaatattataaagtttaaatcagatttatgctataggctatttgtacctttccatgccttttaattctgtgttgtcttgagacatttcagtgtatatccagtactggtgtttaaaggaaagttattaaagtttggaataagagtacctgaattggaatcttgctttgccattcaccagctgtttgtccttaaattctctcaggtaatctgtagccttaacaattaaaggtgacttctatatgtcatttagcttacttatccattatttctgaagttgttaggattattgtaactactgttgttgttactatttttagattaatatatttcctttctggatttccatttaaaatatatttaaagaatcataaaaattaaacacaagcaacatccttttatattctgcacagttcttagcagaattatagattcaaaaaagacacacagaataggccacaatacatgtgccaatttttgttctcaatcttaaaattacatagtataattattatggttatctgaaaacaatcacgttgtgcacatgtaccctaaaacttaaagtataataataataataatagtaataataataataataaataaaataaaataagtatctgctcttttatgaggaaattgtttttaattgtagtagttatttttcagtctgatctgaatctagatgagttttttatgttatatagaagatcattttatatatttttatatagggttactattacagaaaaaagtaaaagttttactgctactcttttaagctttttgtatttgtttaaacaggtttttggcatttaatcgtcatccttagtggtaattgttaaagtacctttatttagaaaattgagaatcaaatgaccttcaaaagatcatcagtttttcctgactttttcaggttaggttcagagttatccactgatgctgttgaattctagggatataagtttgtgaatagaatatgtaaaactattgcactccttccattatgttaccttcctgtgtaagtagtaacagcttgttttttcaacggtcatacttcattcttctaaacagctatgaacatagaaacaaaatcttttgaggtgtctcaaaatagatatagtctacattggaaaggcctttctcagtctgcttattctatattttataaaagtctggaaaggtatagccttgtgtttttctttcccaagttttctttttaaaagttattttatttctctgagaatcttccataacaaccaagttacatagtttagattgaagcatccagtttgaaaggcagcaggtaaactctgacagattaaaggtgacagactgaaggaggagataggaaaaaataaaagcaagtaaaagaggaaaacatccagcatttggagatgtaatcttctcagtcagtcctgaagacatcattaactcagtggtcaagaaaaatatttttcattcatactaatcagaaatacagacatgaaaatacattggaaatattaactattactttcagttttggtatttaaaattgatattctagtgaatgaaagtttcatattacatgtaacagaaatttggattaaatcagtaatacatgtaatacacaactagtatacttagcatagcacctagctcaataaatgttagcagctattactgtttttgttatcaacatctttcccccagttagtcagtttaccatcacctaaaatgtctttagttctttgcatacttatttaattttttaaatatgtattatatgacctttgtgtattaaattgatttgtctgtggtcatagagaactattttgttctggttattaccatgaaaaaaaaaaagcaccaattgctggtacaatacaactgaagatagcaagtgttaataggctggactactataattctagagctgaggattttgtgtacatatatatatttaaaacttacacatatgtttttatgtatatttaagacttcgtttttttttaaacagcagttttagactgacagcaaaattgagagggacagagataacccatgtagcccttgcccccacaaatgaaagaattaaaaatgcatcagtagctttattttggcttttttaaaaagatgtaattcacatagcataaaattcatgcttttatacaattcagtgtcagtatatttgcaaatcctgatacttgaaaaaaattaattgtgcatattaaggtatataacaattatgggatatagatggtaaaaagtttactacagtaaagcaaattaacatgtccattatcttacatactttttttgtttctgtggcaagagcagctacaatttactcatttagcatgaataccatatatagtacaattttattacctattgtcctcatgtggtacattagatctctagacttgttcatcttgttacatacctacctcttcccatttcctctcaccccacccctagtaaccattgtttttaagttctttatctctgtgagagattccacttacaaatgatgtcaggtactatttttctttttgtgtctggcttaccatgtagcataatgtcctccaggcccattcatattgtggcaaatggcaagatctcctttttaaaggctgaataatactccatcatacatatttaccacagtttctttatccattcatttgtcaatgaacaggtagattgtttccatacctggctattgcaaataatgctgcaatgaacatgggagtgaagctacctttaccaggtggtgatttcatttcctttggctatatgccaagagggattgctaggctgtatggtagttctatttttaatttgtttataaacctccatactgttttccatattgactgtaccagcctacatctgcaccagcagtatataagaattcccttttctggcacccatgctaacctttattattttttgacttttttagaatagccattctaacaggtgtgaggtgttatctcttagtggttctgatttacatttccctgatgattaaagcctgtactattaaggaaacatatttttcttaagtatttttttttcttagctgtatgtaatctttagttttgcccatgtgatgactacttcctatcttcctcttgcattcttttacatttttattctctttgattctggtctaatgtcatatctcttttggaaagggattcttgattcctcatatacatttagttgccttctctgccctgggctcccacagtgctttgtttattcctttattatattgcttatcacatttatattgtaattgtcttttttttttttttttttttgagacagagcctggttctgttgcccaggctggagtgcagtggcacaattttggctcactgcaacatctgcctcccaggtgcaagtgattctcatgtctcagcctttcaagtagctgggattacagctgtgctccaacactcccggctcatctttgtattttcagtagagacggggtttcaccatgttggccaggctggtctcaaaactcctggcctcaagtgatctgcctgcctcagcctcccaaagtgctgggattacaggcatgagccaccgcgcctggccatatattgtgattatttctttaattgtcttccctttcagactgtttatctgaaaaacaagattttgtttcagtctctggcctaagactgagactgttcttgctttttcactatcctcaggacctaaacatgctttttggtacatagtttttgattattgccacgaatagttgctgctgtccctaagccttaaacataaaccgagagcttgatacactatattgagtggtgaatattaaaatagtttgctttttgtaagctgggaatcataccattttagtgttggaaggtacctgaaatattatctagaccagtctttccccatttctcacacacacacacacacacacacacacacacacacacactccctctctctctctctctctctctctctctctctctctctcacatgttcacatgaagcaaattgaaatctgtaaaggttgaatgacagtagtgaatttaggactaaaaattcatgtttactcatcttttcctgtaccattctattttctctgataccttataatctattctgaggatttacaatgcaaattcatttatttcctgaagtttagggaaaaaaccctgaaaatgttagtttaatttgtattattatctttttacttttaactataagtaaggcaccattgccaaccagaaaacaggttgagcatcccaaatctgaaaatcaaaaatcctaaatgttctaaaatctaaaacttttttgagcactaatgtgaagctcaaatgaaatgctcattggagcatcagatatcagatcttcagatttggggtgctgaaccagtaagtattttaaaaatctgaaatacaaaacacttctggtcccatgtattttagataggggacgctcgtactggaaaagaaattttaaatttgtttaaaaagtgacaatatatttctgttttacagacctctgtgagtgaaagccttcagagggaagctgctaagaagcaggccatgaaacaggtaaggtagaagactgggataagtgcattcagtgaagcattccggctcatttttaagcatcagttttggtatctaggtgctgagactaaaacagaatagatttaaggaaaaacacaatgaagaattagctccttattgctgtgctatagattaaaccagttctgcttgtagatgactcattagtctaataatggattgtttggcctgttgttattattaaattcttgctagtgagcttacttgcagggaaaaaaaaaaccttttcacaaccaaaatggtttcacaaacttataattatttgaaactcatctgcccagaaagaagaatatcagagatagatacaaatatatagatatatagatatatagattttttttttttttgagattgagtcttgctctgttgcccaggctggagtgccgtggtgcactctcggctcactgcagtctccatctcctgggttcaggcaattctcctgcttcagcctcccgagtagctgggactaaaggcgcatgccaccatgcccagctaatttttatatttttagtagagacggggtttcaccgtgttggtcaggctggtctggaacccgtgacctcaggtgatccgccaacctcagcctcctgaagtgctgggattacaggcgtgagccaccgtgcgcggcctgataatttttaaaagacgtgcttgtttccaagtgctttttacatacatttatcttttacagttctcacaaacttgcccatagtactgattaagaaatctgaaactcaaaaaggataaagtgctccttaagatcatactattaattatcgaactaggcctgaaggtttactaatttttctgctattgtagactagtatatcttagattttctgctatagaatgtaatgaaattaaacaatagcgaggtgcctttgtttttcattttgaattatttatcctctccattagctttataatttttggtcctatttcctctttgtctaactggaaacctgcataaagataagtttattaagcactttctatgtgccaggcatcatgacaactatgttttaagaatgatctttaattcttacaataattctatgagatagatgcttttataatccttattttatagttaaggaaatgaaggcaagaagaatttatgtgacttgcatgagaccacatagttaataaatggtagggctgtgttcaaaactagacagtgaaacctcagaacctaggcttttaaccactgtgtttcacaccctcccggacgaattggcacagaaggatatatttagtcattttaagataatgtcagagtttcacagtgaaatataatgtgtaactcagcagcctcagaatgatttaatatacacataaaacataaaaaacagtgattatttaacataaatactggagtgctttgagtcagaattttggagataccattaagttcaacttcctcactatataaatgggagacttagttctggagagttgggtaacttatccaaggtaatacaggtatcttgttttccaggattattttaacatttttgtgctgcctttttttcttcacttaaagcatgaatcccaaatctgattttattcttaactctgtcttgttcaagccactttatctgtttagtgggactttttgtagtttgcttggaaattaggaatgctgctacaactcttacacctttcacctgctttctgctgattttttctcgcacctatattacatacttttccctttgttccccacttgattgattcagctcatcgaatgtctttatccatacgaattgaaattatttttcattttactatgaagaatactagcttgattgcatttactaaatcttagagaaaatgctttttaaaatggggtactttaaactatttttttcttctatgtggacctcaagtttacagaactgatgatggcaacattattgtcatattccgtttcattgggaaaactttcagtatgtcatcagtaaataaaacatttgctgtaggtctctgatagatatttgttgctaatctaaggaaattattttcttagttggagggttttgttgtttgtttatttgtttaaatggtgaactacatacaaaaaggatactgcttcatgaccatgttggttttataccaataatgtaaagtcagcttaactttagaaaatcaatcattgtaacttcacataagtggtataaacttaacataagcataaaatgttatcattttcatatattgttgcatttggcttactaaagcttcattaagagtttttaagtattgaagatttttgcatcataagtgagactgggcagaataggatggtttccttttctttcgctgcaattatctagattgaaaaagtctgataataccaaggtttggcgagccttatacaatgagctaatatgatactatatacattttgtttgtttctacttcattttctgtcctgacagatcagtgtgttcttcattctgttttctttgggtttattttgttatttttctaactttttgagattgctgcatagctctgttttctgttctcttttctaatatatgcatttaaggctatatgtttccctctaagtacttctgtagctgtatcttacagattttgataggcagtatttttgttgtttcatgcaaaacattttctgatttgcattatgatttcttgtttgacccatctattattaatttctgaacataacggaggtttttgattacctttttgttattcattcctaatgtgattactttggttttttgcttgtttgttttttggggttttttgttttgttttgttttgttttgtttttgtttttgtttttgagatggagtcttgctctgtacctaggctggagtgcagcggcacgatctcagctcactgcaacctccacctcctggattcaagcgatttttctgccttagcctcctgatagctgggatttcaggtgtgcatcaccacacctggctaatttttatatttttagatggccaggcgctctcttcacctcaggagatccgcccgtcttcgccccccaaagtgttgggattacaggcatgagttgccacacccagtccctaacatgattattttggattccaagacactgcactgtattgtttcattcctttaaaacctgtagaggtttactttatggtccagtatatagtcagtttttataaatatttcctctgtgtttgaaaatgttctgtattgatacaaaaattagccgggcatggtggtgtgcacctgtagtcccagctactcaggaggctgaggcaggagagtcacttgaacacaggaggtggaggttgcagtgagccaagatggtgccactgcactccaggctaggcaacagagcaagactccgaaccccccccccaaaaaaaaagaaaaaagaaaatgttctctatgtgtccattgggccagttgtgttaatccatatatattcatactgtttttttttgttgttgttgttgttttgttttgttttgttttgttttgtctgttctgttactgagaggcatatgttaaatctcccactgtgattatggatttgtctatttttccttgaatatctgttcaatttttgctttatttatgttgcaacatagttaatagtaacatatctactcaagtgctcccctacagctctcctcccaacatatacaaaggcatgtcatcagtttaaaacagccctggccgggtgcagtggctcatgcatgtaatccctgtactttggaaggccaaggtgggtagatcacgaggtcaggagttcgagaacagcttgaccaacatagtgaaactccgtctctactaaaaatacaaaaaattagccaggcatggtagcaggtgcctgtaatcctagctactcaggaggctgaggcaggggaatcgcttgaacccaggaggcggaggttgcagcgagccaagatcctaccactgcacaccagccaggacaacagtgcaagacttcgtccccccccccccaaaaaaaaaacagccctcagtctccctttttccttgctttttgttattgtagtggtgattatttcttagattccatgtttccctctttgtgttatccaggctggttttggggagtgagcaggagtgccaattcaacatctaggcaggagaatctttcactttctaaaggttgagaagtgaaaaaaatgaatttcttaatattttaaacaatattctagaaaaaaagtttttcagttagcatgtgcattattcagagtttaaatgttggtatgtaaaaaccctagtctatcagatagattcttttgaataattatatcatcctatcacttaaaaaggatccctcttgggttctacattagccaatctagcaattgaggaaaaaatcaaagtgtgtagactctgtacctcaggaatttacaaccgggggcaaaaggctaagatttgtaaaacaggaagtaaaaacgcccatgcctggcatggtggctcacgcatgtaattccagcactttggggggcgctgaggtgggtggatcatttgagcccaggagttcaagaccagcctgagcaacatggtgaaactctgtctctacaaaacatataaaaattagccaggcatggtggcacacgcctgtagtcccagctacttgggtggctgaagtgagaggatcacttgaagcctgggaggcagaggttgcagtgagccaagatcacaccactggcactccagccagtgcgacagagcgagaccccatcgctttaaaaaaaaaaaaaatctagtgtaaatattgcagaatagaatgttcctcagagtttagaagaaagatcattgggggttagaggcctcagaaatgggctcatagaagaagtagggctggccctgaaacactgggtaagattttgatcgcttgaaagaggagaaaaaaacatcatttgagatggaaggaacatgataaaggcagagactttatgtttaacaactctaaaaatgataatgaaagtttaatatataatacaggcctctcaaaaccaaggttaggtgtttccatcgtaccttttgaccttttgatgggtataattatatacaaatgaataaatgataataatagttgatgtttattgaatacttattctctatcaggctctgttttaagtttagtcatttaattataacagcttagaatgtaaatatagtcattattctttctcttctagatgaggaaattaaggtaccaaaagattacaaacaaacttgcccggagtaattagtaagtgtagagccagcattcatacccaggcagcctggctccagagtttatttgtatttcctatctaaaaatgtgattgtaatttttatgatatattttcaatttatgaaccattctcaaaaagcatagactttgttgtatctattggctggctcatatttttgaaacatgtttaatttttttttaagaccaaactggaaatccagaaggcccttgcagaagatgctactgtgtatgaatatgacagtatttatgatgaaatgcagaaaaaaaaggaggaaaataatcccaaattgcttttggggaaagacagaaaggtttgtaagctgaaataacaaactttctttgaccttgacctacattttgtgtcttaatcttattttaacatgagaatgatctgagaaaaagcttttaggtatgtgaggtgtgaagagtccctaattccagatattacaaatttgattgtagaactcaagcagcactacatattatcctaataggccaggtgaattatctaacaattttgctttttgctttgaaacctttgcaaatagttttttgaaaacttttccttggaattctaatgtaccaaatttgtactgttcctgccctgtgtatgtttatttgtgttttattaccctctcattttttcatttcttcctagctggtaactgaatcatctgcctgcacctatcatgattttattttcagtgagaaaaaaatttgggaggggtaaaaactgaaataagttcagattttctttctatcaactcttgttctttcacaagcacaggctgatttttaagggcatttgcatctgacagttatctactagtagagtgatggtataaaattatattaagctactattttaaatagtcatatttctactaaatgtgaaaaactagcaggaacttttctgatttttttttaattaagataataccagaaaaaagaaaaaaattatatttagtttgatgttttattaaagttaaatcgcattataaacaatttctatctctgctacacctaaatttttatggaaaacagtttcaatattaatcttgctagtaagtttatattgaatgtagggaagacaatcttatttgggccaatcatttctatcttaatgaattcattataaaaattataatattaacaattactatttttttactcttttcctaaatcttttttatttccttagcccaagtatattcacaacttgctaaaagcagttgagatcagaaaaaaggaacaggaaaaaagaatggaaaagaaaatacagagagaacgagaaatggaaaagggggagtttgatgataaagaagcatttgtgacatctgcatataagaaaaaactgcaagagagagctgaagaagaagaaagagaaaagagggctgctgcactggaaggtaaaatgaaagagtgggaaaggcacaaggaaacagtagcagaatctctcccctgtggttagctgtttgctctgtcactgaactttagggttatgagtttgtgatcataatttatatataggaattcaagacacaaggaatatggtattatatagcagtataaaacagaaaggaaagtttaactaaaaacacagttgaactcttcagtaactattatttctactagacttttctcttagttctcattttgtggcttttgccttagaacatgatctgaaatgtaaaaacatttattacaaagtataacgccatggcatttgtcagaaacaatataaatataattttaaaccctagttacatttttttgggatgagaaaataatagagtaacaccactcaaggaggatcaatgaggcaattagaaaaagaataacattaattgaagaaagaataaaaattggatgaattaagaatatcttaatgctttaccttagtgctttctactcatgattatttctcaagatctaagtagaatatgtatttataaaatacttttttttttgagactgggtctctgtcacccaggctggagtgcagtggctcaaccatggctcactgcagccctgacctcccaggctccagtgatcctcccacctcagcctcttgagtagctgggactacgggaacataccaccacgtctggttactttttgtattttttgtagagacggggtctcactatgttgccggggctggtctcgaactcctgggctcaagcaatcttcctgcctcagcctcccaaagtgttggcattacaggtgtgagccaccatgaccagccctgtaaatactttaattgacaaatgctcatcagctttttggacagagtctcgctgtgtcgcccaggctggagtgcagtcgtatgatcttggctcactgcaacctctgcctcccaagttcaagtgattcttatgcctcaggctcccaagtagctgggattacaggcatgcaccaccacacctggataatttttatatttttatagagacggagttttaccatgttggccaggttggtctcgaactcctgagctcaggtgatccacccacctcagcctcccaaagttgtaggattacaggcgtgagccactgcgcccatcctcttcagcttttaagtagaagaaaaccaagtctataacattctgtctaagcatgtactatgtgtttagagtgccagtcggcaaactttctgtaaaggaccagatagtattttagtattcatattttaagactttaaatttataaattcatattttgaatgccagatcatattcatactttagggctttttgtgtatatgatctctgtcgcagttactgagctctgcctttgtagtacaaaagcagttgtggacaatacataaatgaacagggctttgtttcaataaaaatttatttatgaaaacaggcaacaggccagatttggcctgcagtttgccaactcctgatccagcgagtagtttacacactgtatgttatatactgtatgtctgtaaaatgaaactgcactgtgccttattgaatatattctaatttttgctttccctctgttagcatgtttggatgtaaccaagcagaaagatctcagtggattttataggcacctattaaatcaagcagttggtgaagaggaagtacctaaatgcagctttcgtgaagccaggtgaggagacgtgtatgaaatattttgaagaaaaatactgttaataatctgtggttgtggggtcattttaaccctctgaaagatggaagattacaacattgcatattgtgttgtcagccagccttacctaactgaatgaatggctagaaatttgcagtttcttgattttaaaacctacagatttagtttaagatcatttttattctgcatttcacagaaattgttacattaaaacagtgattgagtttaatattattgtaaaaccaaagacagacttttaatgtataaagtttctgaatttttaagtgatttatgggtcttaacaagggagagcaaaatcttcaagggaaagcaaaatcaaattgtagttttttcttttttcttttttttttttttttttgaggcagagtctcactctgtcgcctagggtggatggagtacagtggttcaatcatagctcactgcagcctttgcctcatgggctcaaatgatcctcccaagtagctgggactacaggtgcaagccatcatgcccagcgaattttctttttgtgttttttgttgttgttgttgtgtgtgtggttttttttttttgttttttttttttttagatggaatggagtcttgctctgtcacccaggctggagtgcaatggcgcgatctctgcttactgcaacctctgcctctcaagttcaagggattctcgtgcctcagcttcctgagtagctgggactataggtgcatgcactacgcccggctaatctttgtatttttagtagagatggagtttcaccatgttggccagactagtctcgaattcctgacctcaggtgatccacccgcctcggcctcccaaagtactgggattatatgcatgagccaccacgcccagcctctttttgtatttttgttgtggagatggggctttatgttgcccaggctggtcttgaactcctgggtttgagggatcccccctctatctcagcctcccaaagtgctgggattacaggtatgagccactgcacctggctgcttttttttttttttttttttttttaaataagaatgtgggtattcctcatgatccttaaaatgattggtgcctggtaccttaaaatgattttgctgtcagaattaaggagaaagttggaaagaattaggtgtctacaatataagtcttatatacatgttcagatagtgtataaaaaggaaagtggtttgttttcataaatagaacccagccttcctaaaatgtaagacttacatatcggggctagaactgcactgttagtatgtaggcactagtcacgtgtagctacttaaattaatttaaagtaaataaagtaggttgggcgcagtgactcacgcctgttatcccagcactttgggaggctgaggcaggtggatcatgagatcaggagatggagaccatcctggccaacatggtgaaaccctgtctctactaaaaatacaaaaattagctcggcattgtggcacatgcctgtaatcccacctcctggggaggttgaggcaggagaattgcttaaactcgggaggcggagattgcagtgagctgagatagcgccactgcactccaacctggcgacagagccagactccatctcaaaaaataaaatggctgggcacggtggctcatgcctataatcccagcactttgggaggccaaggcgggcggattgcgaggtcaggagattgagaccatcctggccagcacggtgaaatcccgtctctactaaaaatacaaaaaattagccaggcgtggtggcgggcgcctgttgtcccagctacttgggaggctgaggcaggagaatggcgtgaacacaggaggcggaggttgcagtgagctgagattgcgccactgcactccagcttgggtgacagtgcaagactctgtctcaaaaaataataataataaataaataataaaattaagtaaataaaatttaaagttttgatcacagcggccacatttcatatactcagttgccatatttggctggtggttgccatactggggacagctcacatatgaacattaccatttcttgaggcatttctattaatgctggtctagaaggtaaaggattagaggatttttgaataaagttataaggtattataggaatggtgagatgattatgccataattatgtagctgaaggtaaaagagtctgtcctaagcaaaaaaaaaaaaattttttttaacaggaatgttctgggtagatctgagtctgtgttgctaaggaagggaagaggtaggagaatagaattaaggtgaggagaggaagtttatgccccactccctccctacgctgctaggctttgattataaaattggtgagaagtatgaacctaagaaaatgtatttgaagattcaggttttgaatggaaattatattacgttatatctttgtattagagtttcatctggaatatttattaggctgccatgaaactctgtaatgtcgttgacatagttgtacttcttagagtctaataatcgaattcctaactgttagtgggtcctttagccaagatagttctgccagtaattcctggagaaccaaagttgttgcaccattagtgtgattagtaagtgattagtaagaatcactgagtggttcttatttacattatactcatactataaagttaactgtacttgccagctggaacaatgaaggtaatataattttagtattgttgattctaatggacaaattaatatatttccattttgttgtgataggtgccaaggagtgaatcaggatacactcatgagagagagtaaatatttaggattatatttgccactattttgctgtgcaaagattatcttcatgtatttctaggactatttttataattttttaaaaagaaaaaggccaagcatggtggctcacacctgtaatccccgcactttgggaggccagggtggttggatcacctgaggtcaagagtttgagaccagcttggccaacatggcaaaaccctgtctctactaaaaatacaaaaattagctgggcatggtggtgcaggcctgtaatcccaactactcgggaagctaaggtgagaggatcacttgagcctgggaggcagaggttgcagtgaaccgagattgtgccactgcactccagcctgggtaacagaatgtctcaaaataaataaataagaaaggaaacaacaaatccaacagtcacaacttaagcttcatgttgtgaaaatagaacttagattcagaacatttattacttttcccaattattctttgtcttaggcttaccaaaaaatgaagacctgtacagacccttgcctgtaggttctagtagtatagtagacaagggctaattttctcttttcacttctacaaatattgaaaatattctgaatggtatgaatttgaaaatactagtttgcatagacatcaggacctttttgcatttggataatcagacagtatatatcactataggtgtattgatttgagtattgataaaaattatatgaacccttcatttgcttattacaactgataatgtggcatttttttctgcccttttttgttttttgtttctaagatctggtataaaggaagaaaaatcaaggggcttctccaatgaagtaagttcaaaaaacagaataccacaagagaaatgcattcttcaaactgatgtgaaagtagaggaaaacccagatgcagacagtgacttcgatgctaagagcagtgcggatgatgaaatagaagaaactagagtgaactgcagaagggaaaaggtcatagagacccctgagaatgacttcaagcaccacaggagtcaaaaccactctcggtcacctagtgaagaaagagggcacagtaccaggcaccacacgaaaggatcacgaacgtcgagaggacatgagaaaagggaagatcagcaccagcagaagcaatccagagaccaagagaaccattacactgaccgtgattaccggaaagaaagggattctcataggcacagagaggccagtcatagagattcccattggaagaggcatgaacaggaagataaaccaagggcgagggaccaaagagaaagaagtgacagagtatggaaaagggagaaagatagggagaaatattcccaaagagaacaagaaagagatagacaacaaaatgatcagaaccgacccagtgagaaaggagagaaggaagagaaaagcaaagcaaaggaagagcatatgaaagtaaggaaggaaagatatgaaaataatgataaatacagagatagagaaaaacgagaggtaggtgttcagtcttcagaaagaaatcaagacagaaaggaaagcagcccaaattctagggcaaaggataaatttcttgaccaagaaagatccaacaaaatgagaaacatggcaaaggacaaagaaagaaaccaagagaaaccctctaattctgaatcatcactgggagcaaaacacagactcacagaggaagggcaagagaagggtaaagaacaagagagaccacctgaggcagtgagcaagtttgcaaagcggaacaatgaagaaactgtaatgtcagctagagacaggtacttggccaggcagatggcgcgggttaatgcaaagacctatattgagaaagaagatgattgatggctaccccaagagaaagatttaaggaagcacagaaaactgtaattcctggaacctgctgcgtaaaaccataaaggagtgtgttaccagtagtttggagggcatttttaaatttattttcaaaattttaagttaaaagtcagtcttacagcttggatgtttggatgtggatgtttggctgaatttatatatagtgtgtactcatcaataccacattctttgttgtattcaagaaccgttaagagtgtgctaattccctgtaggtacataatgaggaaaatttgctccactacaaccattaaaaaataattttggccagatacggtagctcgtgcctgtaataccaacattttgggaggccaaggcagaaggatattgaggctaggcattcaagaccagcctaggcaggataataagaccttgtctctatttaaaaaacaaaaagcctagcatggtagtccatgcctgtagtcccagctgttcgagaggctgaggcaagaagatcacttgagcctaggaatttgatgttacagtgaggtatgatcatgccactgcactccaacctgggcaacagaatgagaccctgtctctaaaaaattttttttaaataaataatttaactcttctaataatgttttgttgcaggaaatgtatttcagataaaatatggatttgaaaaacagaaaatatactttatgttctgaaatttgtatttaagtataaaatgtgaatcatcttgtctaaatagcttacagcatagttggcttaaatgaaaataaaatgatatgcttatacattttatttatgcatttattttaaaataattttactcatgtcacaattcatcttttcgcttttagtagaaattaatttgtaattctgaaaccttgacaagttagtaaattggttatatatgtaaatcacttttagttaaaggtgaagctgtggagacattagcctaaatgaaattagctaaagatctaggtggcctgtttctaaacatgtcttgtttcacctactctgaaaaagatagtgcagtttattacaagttccacttgtgtataaaaataaaactagtatctttcttctgagtctttgaaactcaggagaaataattatacactgtaaatattttatttatggggaaagatgaatgctgtggagaaaatagttctctactaggtcttcccattaagaaaatgctgttcatatatctcacaatactctacctaaagagcacactttcttatttttagaaggataaacttggtttaataagaatgctgactagatgaaatatattaagggtcagatttagaatttataaatcattttattgtacctttaaaaccagaaaggaaaagtcacaggaaagttaacgcccaaatctctgactgatagattaaatgtcagttacatcctaatactctaaagtcaatcagtgacagtgacaaacccccaaaatcactgacttggtgtacaaaaagggagcaacataacatcagtatggaaaggtaaaagggtgacatcatggaaggaccatgagtgacagaaaaaatctttaactttggtggggagtatggtttctttcttgggattgttttataactagagccatgcattgggaagattaatttgatcgtagtgtgcaaggtagtctaggaggagagactgatgtcagagacatctgatgataaactcagtttccctctcccagagggaaaagctcagagacttttacaaagccgcttggatccttagataggaaagctataaattacttttattaaccaacttaatttgacataaatcaggatgagagactgcaaatgaagagttttcttctgtctcctccaaatatacagaatgttggttttgcctctctggtattcattcccccttttcctggtaacagcaggatttgcctttgagaaaacacacctttactactcttagtccacgggttcaaatggggcagaatagcctacagtaagggtatgtgactcaagctaggctgatgctggtcatgttgtcagaatttacagaaagatgttttctgttgtcattgctgattatggcgatgaggtaagtctggagtttcatggagagtgccttgctgcctggcagaaaaaaaacccacaacaagaaagccagacagagagaagaacaaaaaacctgatgattgcttttgcatctctggctctagtgtagctttttttttttttttttttttttttttttaagacatttaaaccaatacttttccctttttctgttaggttagtttgaattggatttctgctgtcacaacccaaaaagtcctatttgatacaaggttccattcatgatagctctgtgccaaaagttaccagaacactcttagtaaatttttttgttgtagtataaggtttaaattgcacatggagtttacagcttaatggattcacacagtacacctagtttaaaaagacattacctgtgccataggagctccccttaaacttctctcccagcctactctttctgatttttagcaccttagagtagttttgcttgttttgtagattctttactactacattctgttgatggacattggttatttctttttggggttatgaataataatatcttctaggtaatgtatcttctaggtacattcttgcgcttgtcatctagtacatacatgtatgttttggttgggtaattctgaggaatggaattgctgattcatagggtatgctcatgttgagctttagtagttaactaccaattagttttccagaatatttgaactaaaaggcactccctccatcaatgtatgagagttccagttgccccacatcttgctcacccttggtatttgtcttctggctttttgtcttttagctactctggtaggtgttgtggtatctcatggttttattttgtggttccctgatggctctcacatctttattaacatttaacatttgggtatcttggcgggggttggtatttgtttttgagacagggtctttctctgtcacccaggctagagtgcagtgatgcaatcatggctcactgcagccttgacctcccagggtgaagtgatcctcccacctcagcctcccaaatagctaggactgtagctgcatgccaccacgcctggctaattttttgtagagacggggttttactatgttgtctaggctggtctcaaactcctaggctcaagcaatttcgcctgcctcagctttcaaagtgctgagattacaggcattaactacctttccactccctgcttttttttttttttttttttttgaggggggtgtggaggggaactatctgccttttccttaatccagtacaggttttgttttgttttgttttgttttgtttttgagatggagtttcgctcttgctacccaggctggagtgcaatggcatgatctcggctcacagcaacttacacctcccaggttcaagcgattctcctgcctcagcctcccgagtagctgggattacaggcgcctgccaccacgcctggctaattttgtatttttagtagagatggggtttgtccatgttagtcaggctggtctcgaactcccgacctcaggtgatctgcccgcctcggcctcccaaagtgctgggattacaggcatgagccaccttgcctggccccagtacaggttcttcagatattctaggtacgagttatttgtaaggaacttctccctcccctctatggctttaccttttcactcttaatggtatttttaatgaacagatatctctaattttacaaagttaattaaaattaataaaatttaaaatacagttcctcagttgcattagacatttcgaatgctcaacatgtggctggtggctgccacataggacagtgcaggtttatagaacatttctactgcagaaagttatactggacaacattttctagaagcattattgcctacatttcccatttagatctacagtgcacttggaattaatttttgtttgtggtgtaagataggggttaagatttttctccatatggatatcaaatagactcagcagcgagtgactatttgttcagattaaaaccacagtgaataccattactcattcacaaggatgacaaaatgttaagagacataatacgaagtgttgatgaggatgcgaagcaacggtattttttttttttttttttttttttttttttttgagatggagtctcgctctgacgcccaggctggggtgcagtggcgcgatctcagctcactgcaagctccgcttcccgggttcacgccattctcctgcctcggccttccaagtagctgggactacaggcgcctgccaccacgcccagctaattttttctatttttagtagagacggcgtttcaccttgttggccaggatggtttcgatctcctgacctcgtgatctgccctcttcagcctcccaaagtgctgggattataggtgtgagccaccatgcctggctctctttttttttaggatagtcttgttctgtcgcccaggctagagtgcagtgatgcaatttcagctcactgcaacctttgcctcccggattcaagcagttctcctgccttagcctcccgagtagctggggttacggacgtacaccaccccgcccggctaatttttgtatttttagtagaaacagggttttgccatgttggccaggctgatcttgaactggcctcatatgatctgcctgccttaacctcccaaagtgctgggattacaggcgtcagccactgcatccagcagcaatagtaatttttgtgtgctactagtaataggtgaactggcacaacctttttgggaaaagtttggctttacctagtaattgacactgcatgtttcctgtaactcgtgttccacagatgcaccaggaatatctataatacattttcaataaatgacaacctaaatctctatcagtagtaaagaatatatagctaggcgtggtagctcacgcctgtaatcctagcactttgggaggccaaggtgggcagattgcctgagctcaggagttcgagaccagcctggccaacatggcgaaaccctgtctctactaaaaatacaagaaatagaaattagccaggcatggtggtgcgtgcctgtaatcccagctactaggaggctgaggcatgagaatcacttgaacccaggaggcggaggttgcagtgagctgagatcacgccattgcactccagcctgggcgacagagcaagactgtcaaaatatatatatatatatattcacacacacacacataggcaatacaacagttaaatgaatacactagagctatacccaacttggatgaatttcagtcttgtgagaagaagtaatatatatatataggggaaaaaaggcaaaactatattaaaaatacatgggtaggtggtaaaaggggttataaatatggaaaggaagaaaattagaatgaactttgtagtgttgggttggaattggagatattggtgtgacctcatggtttttaagatagagaaataactattaaatgcaaattatgtatacacttctatccagtgagagggctgaggatcagtgacaactcagtagccatgagaatacctaacacccagatcgtggtttctaaatatgctcttgactaaaaggaaccagggcttcttggagatatagctgatttcagagctgtggcagagaaagtacaagctggtcccgaaacatctcactctggaaaacaaggaactgttccaagaatgatggggacatgtcaaaagcacacagaaaccagcttgaagggactctcactggctaaatataggaaaaattgagcatcaaaattaataatgggggcaggtgctgtggttcatgcctgtagtcccagcactttgggaggccagggtgggaggattgcttgagcacaggagaaccgcctgggcaacatggtgacaccctgtctctacacaaaatacgaaagttagccaggcatggtggtatgtgcctgtggtcccagatactcaggaggctgaggcaggagaatcagttgagcctggtcgaggctgtagtgagctgtgatcacaccactgtactccaggctgggcgacacagcgagaccctgtctcaaaaaaatgaatgaatgaataaatgaataaaattgattataatccattggataaaacaggaatctatttttaaaaataaatggattgatgaggacaggatatttgcacagtgtcagaataactccatcccccaaaatattaatgacaaaaagaaaaggaactttatagtggaaagcccggtagacaccaccttaaccaagtgattgaagttaacatcaccagtgaggggacaaatcaaaatcattctccacctggtaggatgcagggaaaacaacacagcaccattccagtgatagtcctgccagaaatacatagcttggatttaatcagcaggaattgatcttcaaacaaatcaaattgagggacattctacagaataacttgcctattaacatcaaaggcttcaaggttgtgaaagtcaaggaaagactggaaaacggttctagactgaagaaaacaaaagagacgtgaaattaaatgaaaatgattctggactagatcctttttcctaaagatcattgaacagggtctaaagatgagttgacagtcatgcagcagtgttactttcctaactatgatggtttaattgtggttatgtaggagaatgtcttcatttgtcagagatacatgtctcattttcatttttgtagttagaatctataagatatattctactttttattcaagtccatttattcagatctcagcattaactatcctctccaccattttacatattgaattttttagtttataaaaaccatgtcactgggtgcagtggcttatgcctgtaatcccagtactttgggaggccatggtgggcagattgcttgagcccaggagtatgagaccagcctgagcaacatggcaaaactcggtctctattaaagatgcaaagaattagccagtcatggtggtgcatgcctgtagtcccagctactcagcaggctgaggtgggaggatcacttgagtccaggaagtcaaggctacagtgagccaagatcacgccactgcactccagcctgggtgacaggacactttgtctaaaaaaaagaaagaaaaaaaaaagtgtgtaaaaaaaaatactggtaatcattttgagatctttagttattacttagtgatatgttccaaaactggagctgagactccaaagagattcctgtaattgaaatattacactttaatactggagttgccctctctataaagcactgacaacattagcatttattttaaataatagcaatatccctggaaaagcagcaggacccagagtgaccactaagccttagtgataataaatggcatctcataactggatgcaacagttatctctaatgaagcctaggatcagatttgtggcataccaacagcacatgtgaaagtcattctggtgtgacatgtagcctcatttctggtcccattttattttctcgctcttgtttttctttctttttgtcacccgtcttttgcttatgttatcctttattttgggaatccctaccttaatacctctttaaacaagtcaatgtaaatcagataatttgaatctagtacaaggattagatttagtgtggtgatggtaactggagagtctttaactgtagggcaggaggtctgttaggaactggaccacacagctcattaccacctgaacttcacctcctgtcccatcagcggcagcattagattctcacaagagtgtgaaccctgtcgtgaattatgcatgcgagggatctaggttgtgtgcttcttatgagaatctaatgtctgatgaactgaggtaggatagtttcatcctgaaatacccctctgctccccactatccgtagaaaaattttcttccatgaaaccggtcccggtgccaaaaaggctggggactgctgctgtctctggctggggacagcacacatgtaatgatatatcagtaacaggttcttcccctatgttaattattcttccctatcacactttaaaatgagatagaacatccttgcagtttagaaaaaaacccattctgcagttgaatactctttggatttctcaagcctctatggatgctaattttaaagctaaacatgtaaataacctttgggctggaattagaaaacctataggcataaagcctgtcctggaacgttccaggtgtgtgaacttgggcaaatcaatcagcctctttgagcttcaggctcttcatcccagccccatcctcacctgggaaaatacagctgtcacctagacttctggtgatcccatgaaatatatggggaagaacattataaactaaagctcttcacaaattacaaagaattatattaacttatttaactttatggaaattgaatacatctaattcaatgtagtttttgtaagtgctatgcagtgatgtttagggagatgtttaaatattttgactataaggttaagatttttaaccttaagagtttagaattttgtgtttttttaatgatacaacaaatcatgatattaagagttattacagtaacagttcacagcataaatcatttattaatatctcacaatctaacttgaaatatttataaacactgcataaatgaatacaagggcactgtatgaattttagaaaggggactcttttatacaaataaatttaggtttaattctgccagataaaattaattttagatatgtccaacacacaatcaaaagtattctgaaaagttgtatatagatcaaatcatagtttaaaggccattcacaaaataactgtaaattccccaattttatcttttaaaatatgaatttttaatatatcattttcttaagataaagtacacctttaattttagagtgtaaataagaataatctttcaaaatgccatttaaaaaattagtaaatgctcatatttgtttatgatatttaagcaaaaatatgggacatccttcctcaccaaatatttttgtttggactgtcagtgtttaaaaattgctagacacaattcttatctactataattggagtcttcagttacagaattgaaggactgatgccatctattctctcccccaaacgacaaaattcttcttagttcagtagacattcaaacttattctgacgaggtccttcaccaatgcacactgtctccaaattagagttggctggtgaagaaagtttattttagtagctttaaaaaaatacttgcattggtggtagagcagcttggcatagattctgtgaggtgttggtaagagaaataccacctgacattccaactgaaatatattgtgaatcattttcaacaaaagagctcttctgttgcaaaggtgactgtttttgaaacacctaatgtagaaacaatactgaattgatttcaactatatgaaacaaaaggacagacatatttaagattccatcctaaaatatttatcttttctatcgtggtattaaaccaattgagagggtttttttgtttttgtttttgttttttagatggagtcttgctctgtcacccaggctggagtgcagtggcacaatctcagctcactgcaacctccgcctcccaggttcaagtgattatcccacctcagtctcccaagtagctgggattacaggagcatgccaccatggctggctaatttttgtatttttagtagagatggggtttcaccatgttggccaggctggtctcgaactcctgacctcaagtgatccgcccaccttggcctcccaaagtgctggaattacaggtgtgagccattgtgcctggtggagagggtattatttcactctagcagaggaaataaaactccagttcacctgtctttagcgctctcaataacagagaaattagcttggtccccaggtttgtctctgcctctaatggcattatctgacctttaaaatattattatcattaaaatttagagacagttaagcaatgaagtggggaaggggcaatactatggaaaatagaaaaagaagacttaaagcttcagaatagtctttccatggaactaagcataacaatttttttttttttttttgagacggagtttcgctcttgtcatccaggctggaatgcagtggaacgtttggctcactgcaacctctgcctcctgggttcaagcaattctcctgcctcagcctcccaagtagcaggaattataggcgcctgccaccacattcagctaattttctgtatttttaatagagacggcgtttcactatgttggccaagctggtctcaaactcctgatgtcatgtgatcctcccactgcagcctcccaaagtgctgggattacaggtgtgagtcactgcacccagcctcttgggtatttcttactgatacaagaaaaaaaacttcagtccttaaataatgttacaattcaattctatttttagtttttatttttctataaatgctacatatagatataaaaggtctttaaaatattattttaaaatccacctacctactcttaaattttctttaaaaaaaaaaaaccccatcatagtattgataaataggggtcaaataaatgcatactatgcggaacagacagagattttcgattttttttttttagtttaataaagtttgaaaactttcaaagctcctgtacaattccattaataccagacttggcaaaacgctaattctgtttgaaaaggtgtttttttaaaagtagtatatttgaacaatgtctaagtatgtggggtggggagaatccatatccgaatatcttcataaagcaagttcttaaaatttgcaaagctattaggttagtgcaaaagtaatcatggtttttcttttgcaccaactaatatttaccactgaacacgctggcatttagatcacttccttctttcagcatgctagacagtaaagagaatgggcatgaggtggcaggaagaaggaaagagtgaagataatggagttaggtcagtgagggatatttcctaaattccccacttcttttcctctagcagttctgggaaacttctcagcagctatcatataaggaaagtatctcgctaggagaagcaaagaatcagaaatagcagggcatggggagaatgcaggaagtgggccagggtagacaatgctggggaaaggaggccaagggaggaaaacctagaattggacaggatgtttcctctgctgtctggaccttctttttataaggttgttagaattaaatttcatttatacagagaactgaagtgataggtggccagatgattaagtccttttgtctctgatgaggatttattcccctcaaaattctgataaggaattcccatgctgcaaatattaatttgctcctctacctacgcctctgagagtcacgagacaccaaaggccaaatttacttatctatattaagggccttatgtgaaatgaaaggtgatttacttagctgaccatttcccaagcagccttacttagactcaaccttaaaaattatctggagggctcacaatcgtgaccgccagcgagcggcgaggtccacgtaaggctaacccagactctccaactgctcttggagtgaagatgccttggtttaggttagggtgccagatctgtataacccagtgctaaacgagaatccgatttaccctcctctcttcaccgagcaaagcaacctggacagtcaaactcagtcacgtaaggcagacagaacttaaaccagagggccaggtgaacactgaaggggcatgtgacaagatccaccttcaacgtacttcacagccaagccatggtgactaatgaaataggccagatctgcctgtggaacactgtcctgaatgtttagcacagagagacaggaaggtggcaatgaggtgcagcaaacgccagaggctggcctgtaaaggaaagtgtgtggctcaagtagtgtcactggaaaaggagtgggtggcagagcatgttgtagtgattgtacccttcaaataataacctccatacacaattgagttggtagaatttgttaatgtaagaaaaatttggggaattcatatatttgtaatgggcccaaaatattggactagagataagaatacactgaaacaacaatatacacagactcacaagcttgcatggacacactatttttcattttagcttcttacatcttcctttcctgatgccacagcagcacatggattagaaggttctagtagattccagcaataaaattatatatgctactcagaaaatatatggctagcgagatagcatccctgttctctcctacgcagtttacgtattcatgaacagtgaaacctttagaagcaaacagatatcagataccaatgatcataccaagaaatgatacaggagactttcacagacttgattctaaacctaatcctaactgatgatagggtggttttcatcacctccatccacatcctcacacgtccaaaataggccagctcagctgtgtcacagtctaccatgggaatatgtccaggggaatccatggaaataagtggctggaggccttgagtctgggcaccagactgtgtccctgtggagaaggcccttccatcatcaggcttagctggaaactcattcacttggaggggagaaggcaggcgtgcctcatcagaactggaggaggaggttgtggagaagcctttttcctctcggtgagtgtgttacacagcattcaagcggatgtccccacaaggaatttctgttggtgtttctggggtaatacttttaataatacgctattgggaagaaaatacaatgttataaacatccttgtaatttttaaaacttgcaaaaatagtcaacattaatattaaaacaaagcttaaataacactttaataacatctaagagcgagttggaatagtctcactgacattccttaggaaaagaattcccaatttatgtattctcaaatatgaattaaaatggtatattcagaaactatacacatctgtaaactaagaaaatcattataacactaatggaagaaaatgatgagccttcaacagaatctctgctggccaataacatgcttttgaaggacttgggaaagggtacccttttctctggacagaggagacttctgcggccacaaagggcttggggagcagagtaattgctgggttttggcccccatcccctcacccaggctccttgtctcctgcagacacactgcagccatactgcccagtgctatcagccactgtaacagccaggatgttactaatttaatgaattcacctgtaaagcaatactggttagttcatatgagagtataaattatcacatagttaaactgtaaaagatgcgattattgaaatcatcacttctaatgcaacattgtgttgatgtagtactcatcacagagaagtggctgagaaggtctactatagaaacagctgaggtacacagaagctttaagatggatctgaaatatacttgggcttaggtgtgaaatatacaactggccttgtaaaactcagcatcagagtggcaaaaagcagctcagggatatagaggagaaaaaaaaaaaaacagccacactgcagaggctttgaaaaatctttattaagttgcttaataaaatctttgttggccaaaagtctgtatgtatcataagcagacaatttggatctgaaagcatcctttgatttactgatctttaggtgaagttctgcccctgtcatttttattttggactgaaaatgtctggagttgccttcaagcttttctattttctcattctgggagtttgttctttaagaaatagggcctctataattcaaaaagttccagtcctacagttaatgaaatgcactatagggcaaaatgcacaaaattgcacattttgtgctcctcatgaccttagtatctgtgtactgaactttcacactagaaatccgtttaaaaaggagtcattgcagggagtttaaaaaggagtcatccgtttaaaaaggagtcatcagctaccagagcatgccgagtcacggaaagcaacttgtcagaaaccatgcattcccacagactaacatgtgaactatacctgattaaacagaattatggcttgttagttgagaactagacagagatcactataacgagtcctttttttttttttttaagagtcagggtcttgctctgttgcccaggctggagtgcagtggcacaatcatgcctcactgcagtcttgaacccctgggctcaagggatcctcctgcctcagcctcccaagtagctggacctacaggtgcatggtacgatgctcaactattagaacttgtcttaagtggagctatcaccatagctcagagagagaagagatcaccgaggtgtttggtggggcaaggcccgcaatgaacgacgtcataaagtcaaacacttggtttttgtgcccttacctacccacatgggctgctgccctgttggtgactgaccacccaggatgccaggcccacgtctgttttccgtgctttgccagcattctagttgccaggctaccgttgtgctggaaatttgccaggccctgcctggccttctgcaagatgataacaagttaatctaagaaatggattcctcttcatatcttcataaacgtgtactcattagggaccattttccagtatctttgggtggattattagtagtttctgcaaaaatgacctaagccagtggatgactccaaccgcaagacttccagaccgtgggtgtgtatggtacccttcaaattacaccagtaagcggtggctcactccacaaactccaaccttgcatatggccagggcccaaaaggattttatatgaggcttccctccctcacacatagaaagttacagactagcaagtctggtattcataaagaattgtgaagaattctagacctttggcaaaaaacacagcatgctttattcttctcagagattaaacatgcacatgggcatattaaagtttttttgagaagtcctcaggtaaacaaacctgtttatttacttatttaatttttttgagacagagtctcgctctgttgcccagggtggagtgcagtggctcgatgatctcagctcactgcaatctctgcctcccaggctcaagcaatttccatgcctcggcctcctgagaagctggaactacaggtgcccgccaccacacccggctaatttttgcatttttagtagagacgggggtttcaccatgttggctaggctagtctcgaactcctgacctcaggtgacccatccacctcggcgtgccaaagtgctgggattacaggtgtgacccactgtgcccggccaagaaacctgtttaacttgccttagtccagcagtctccaaaaattacctgactacataaactttttctccagcagtaatacctgtgacagcccctggaacacactttgggaaatgttaacatggtcaaatgagcacatttgaaagaggaggaaaccgaggcccagataagatgagtacctgccagagccgactagggccttttccatggtcctcaccgacaggggtgtatcacactgcttccgggtaacccgctgctccccatctggtggcccctcgtgaagacgccctacctacaattagtcttacctctattgctaacagacctgagctctgttagtgacacacttttgggtggcattcccttgtggccaactgggggaatttgtgagaaagatggccaggatctgaggtgtagcctgtgactaaagaatgacatttattaacctaacacagttcccacctccaaccttggcctctggatttgaagcaacagagctcatggatcatcacaactgccaagacagatgaccggaaggaatgcgttcaatgactctgggtaggagagtgtgcgggaagcagcacgggacccaaggctctttagggggagtgcggtcatgagagggctggtttggctgtaggaaattagtaactacggagctcagagttctgttcacccagaatacagttttcctgtttcaaaaaagaaatgaacgcagttgttctcagaaagggctgatatttggccgggtgcagtggctcatgccggcaatcccagcactttgggaagctgaggcaggaggattgagctcaggagtttgagaccagcctgggcaacatagtgagatcttgtttctattaaaaatttaaaaatttagccaggcgcttgtagtcccagctagtcaggaggctgaggtgaaaggatcacctgagcccaggagtttgaggctgcagtgagccatgattataccactgcactccagcctggggtacagagtgagaccttgtctgaaaaaaaagaaagagctgatgtttaactgcctatgttctcttgcttctcatttcttatgaaatgtcttaggatgactattgtgatggactcatgtctaaattttgcgtaagatctcaaattagcccacctccgttctcaggctattatagattatgctgagtagctgggactacaggcacgtgccaccatgcgcagctaatttttgtaattttagtagagacaggatttcaccatgttggccaggctggtcttgaactcctgacctcaggtgatccacatgccttggcctcctaaaatgcagagattacaggtgtgagccactgtgcccagccggaaataaggaaacttcgagcaggattattccccacctcagtgtccttgtctggtaataatgcctgcccatttacctcccaaggtactttgataacagaataggataatcgacatgcagatgctttgaaaatggcattcatacaaattgtaaggtactgttattaacatttctacagcgcattcattaccgaaatgaatcttgctatcctggcaaaacatttttactccaatggcttgagctaaaatcatgctattgttagatagctaataattttgatctaaaactatgatactgttgcaacatccttattttgtgatgattttcaaaataatacttttcacattgctgttagaaaagtgaccatggacatttcccaccataattgccacttaaaatttgtgtattgctccagacatcacaggtctgatatccatgcccagtggcaagcaggaggcagggtagttgtctgataagtttgaaaacctatgcacagcccaagctgaatgctctggtgcacccaaatgatcagctcactcttttgcccttgcatttgaggctttgggagatgccttaagataacagtgacagccattagaggtcttcgccatggcacaggtacatacatatatagggttgcatgcctcctggtgaatctcattttgaatagagcataacaagataatccttttctcccaaaacaattagtagtctgaacacacacatatacacactaactagcacgtacctctttaaatgtccctggagtgatgatcaaccgataagctatatatgtggggatgcaaatgaaagatgaggttcctatgcagtaacccaagatgatactccagtaaggataattatattggaaaagtcgtagttgtggcgggctcatcagaaaactgcaaatgatgaactaaaacagaaattccaagaaacattaaaaaccttaacaatatccactcagatagagatgtttccgataccacaaacaccaaatgctaaagctaagatactttcaggaaattcccaagatgtgatatatcctggattgaactctgacacacagaattaccaacttctgtacccaagctgcaagactacaccagccaggtgctttccctgattttcctccccagccctcacttcctatagggggatgttgcagcagccctacagctgcccctacagtcggggctgaagcctgcagctcccacttcagcacaggcctctgcccaggcaaagagactggcaaccttgagagtaatttgggccttgtcttgccagaaggcagaggaataaactgggtgacctctccgcagccccccgccaggccccaggcttcatatttctctctgctttgttttcattgccttgcgtttctggctgtggttgtttttggtcagacggaaggtgcctgatgtccaggaaagataagaaggttctcaagacccagagaggactcaggctcctgggggtgtgtccttctcccattttcctgagctctctgccttctgcattaagctgcatcgcctggagtttcaacaaggatggctctgccactaggcatctcaacaatgaatgtctgcctgccacaggtcctcatcatgaaaggaattatggaaggaaaaatagcagcttaatacacctttcacttgaacactctgtgagaattttgaccaagaaaaattccacagtgtgctcccaacacccagtttatgagttttcttatttcaatttggtttccagattttgcctagtaaccactgtgccgaaattgttattgctgttgatttaattttattttattatttcacagtcataaagaagacagtaatgtgaattatttgtgtggttaaacatctatttatatctttttttttctttgtctgcaggtaataaaatgggaaattgctaaacacacatccatcttctgagcggtgctatcttaagtctaggtggaagccttcaaaacaggaacctggtcaattgcaaaccttcctcctaacccaggctcctcatccccagagccggctatgaagaaagatggtttgggaacagggaaagaagatctggttaggagccatcccggctgcttgtctcttaatgtcaggtgtgtgaaatcccactcagtcattgggggactcaacctccggttggggcaagtgctacttcagaaaccccctcacacatcctggcctctactcgtacacaatattttcttttttttaacttggctgcagtgaaaaagaatatttttagtaagctacttgttgtttacctaaagcagccttaagaagcccagagcaggggatctgttaagtgaacgtagaagtggaagacagatttgcctctctcaggcactagggcacttggctgtagaggggtgagtatggcaaacatcatgggaattatgagtagtgcgcccacatccaaagctgcacgtgggttttcctgggcaaagaaactcaatgactgtgcatcaagagtgtacccagtctgacagcaggaaattgacagaaacgaacagccccaagccccagggcacatggaggcactcacctcaggcacgacatttcagcaggagccaaaatcaaaataaataatattttattacaattttttaaaagacaggatctaacagggccagatgagggtaaagcgagtgaagtacgatgtacaagtacagggctggctcctgtgtttattgaaaatgttgatactttgttaatcatggatctttttgaattaatttttatttttaaaaaatattgtgtgaaaataatatttatcctgagtcctgagctctttggtgccttcttaaattttatacccacagtgaatgtttcacttgccttcaagtctcccctagacatcatttcctcactgcgtggggaataaatatggaagtaaacaaacaaacaaacaaacatctttctgccctcaaggaattaatccaatgactcttcttcctttgaaaaacaaataaaaatatttaagtagattattgagaagtactggtaataatataaattaataacccatttatgtcagggcttctgcttctggtaggatgggctaggcgatttccaacaaccctctcactgaaaacaactaaaacttctggatttaaaaacacacgcattttaaatgtgcctaaatgcatcagcaagctgataaggtcataaggagctccgaggccaacatctcaggagcccagagcttgcaccagagtcactgcagcctgggaacatgtgctgcttggtgcaaacactggctttgattttggaaacctccagggtctgggggaaaggaagtcaaagaggaattctggggtacagagagacacatgcagtgtcacagagacaagaacaagcatgttgtccatcatagataagttaatgtcaagatgtgtgggtacaaaagaagtacaaaaaataaagggttaccccaagaaagtcaaaacacagaatacaaaaagggctgttttcatgtttgttttttgtttgtttgtttgtttgtttagactgagtcttgttcacgtcctgctaatttttgtatttttagtaaagacagggtttcgccatgttgcccaggctggtcttgaactcctgacctcaagggatccacctgcctcggcctcccaaaatgctgggattacaggtgtgaaccactgcacccagctgttttgaaaggggacacagaacagctggatgccaaagagatgtcctaaaacaaaatgggatagcccatatactcctaataggctggaggtggactgaaggaagaatctaacaacatttctggctctaaaagacaaaaaaaaaaaaaaaaacacaaaaaaaacaaagttacagataaatgaaagaactgaagaatagtgcctgctggtgtgcatgacatcagtttaccccaggctacttcagcacacacttggcaggccagcaggctgttatccatcttggacaggggcacgtgaaccaaggacaaagtgaatattgaacacatctcaacacgtggacaacccttgggactcaactttctcacccaggtcctttggtaataaatggattctacttttgacgtggatttttgcttagagagctttgtatcatcttgaagaagatgcatacaaaattgtaaacacagaagtactagtaccccatccagggcccccatgaagagcatagcagatccttccctggtcttgaacagttctttttgttatgtgactttggacccttcactttacattgctaagcctcaatctccttttttcttttcttttcttttttttttttttttttttttttgagacagagtcttgctctatcgcccaggctggagtgcaatggcgcgatctcagctcactgcaacctccgcctcccaggttcaagcaattctcctgcctcagcctcctgagtagcacctagtaccatgcccagctaatttttatatttttagtagagacggggtttcaccatgttggccaggctggtcttgaactcctgacctcaggtgatccaaccacctcagcctcccaaagtgctgggataacaggcatgagccactgcacccagcctcaatctccttaaatgtaaaatgggagtgccagaactataaccacttcatagaactattgtgaggatttatagaaaagtgagtgtaagttgagcctgaagtctggcctggcatttagcgctccataaatgttatgcatcactatcactgccagagtgactgaagcccagactactccatggtgttaggagtcagaagggtggggaaccatggtgggcatagtggctgggagggggcacaagaggggcttctgaagtgctggtcatgtttttgtctcctggtatggttttggctacataggtgtgctcaatttataacatttctttgagatgtacacttacgagctgtatattaatacttttctgtatatgttattcttcaatactatttatttcttttctgaaatagagtctcactttgtcacccaggctggagtgcagtggcgcaatttcagctcactgcaacctccgcctcctgggttcaagccattctcctgcctcagcttcctgagtagctgggattacaggtgcccatcaccacacccggctaatttttgtatttttttaagtagagacggggttttgccatgttggccgcctgcctcagactcccaaagtgttgggattacaaggatgagccaccgtgcccagccattacaattcattttttatgtgtctgggggaagtctttcgccagggcaaggaggagaagggaaatggcaactcaccaggagaaacagagggctgatggccacccagcagatcctccagaaccaccccgggctgaagccgagcatttccttcacgtccctgcagaactgagtgatgcctggaaccgcccaaggggaagagaggcagagactaagaaaggacatgggctgtgctgctgtgccctgattctctgggagagtcagagtcacaggatcagcactgggaatgacaaggggaaatgacaagccggaattcctaccccggacacacagggtagctctggaatttctctctaggaggagtacagcgacaacaatctggtccgaaagtggggctgggggacttgtcacaaaactgcatttttatagcaagcaagactctttctacatagggtgggaggacggatgggcatctggaaggatggatggacatttgggaggatggatgggcatctgggaagagacacacacccccttcttggtgccacaccgccttcctgagagctgagtgtgtatctgatttcattgttattataaaacagttgaattttgtccaggaatggtgaacccgcctgacagacactgactttgaccatgacactggaaactttcaagggaaatttttaaccacaatattgcccattcatatgccagatcaagatcaaggttcttctataaaaagtaactggtaaggaagtgagaactgagaactcccaaagaagagtgagaaattgagaaggggaaggtgctctgtggttgcttccccgagaggtcccagcagttcctagggcaggtctatggagattcacacacttgaacttggtcgtctgaattgccaaggaggtgggaagatttcttctttaaaaaacaaaacaaaacaaaacaaaagcagccctgtgtgcaacccaaaatgtgccccctccttgataatatgtgtaacaaataacatgcaaaagtggtttatttttgtttgtttttgggttttttgtttgtttcgagacagactctcactctgttgtccagactggagtgcagtggcgcgatcttggctcactgcaacctctgcctcccagattcaagcaattctcctgcctcagcctcctgagtagctgagattacaggcttgcgccatcatgcccggctaatttttttttttttttgtatttttagtagagatggagtttcaccatgttggccaggctggtctcgaactcctgatctcaggtgatccacctgtgtcagcctcccaaaatgctgggattacaggcgtgagccaccgcgcctggccgagactcttttacagacccatcatcgggaggtcacatcttgtaaactgcccctcacagccttttttggtgaaatcagccctttgctactgtgctggctgatggtgtagaagggacccagctggctgaaggaagcgtcttaccatagaaccaagacacagcgactgcttcgatcagcgcgacagtgagcactgcgggccccgtggcatactcctccagcagcttcaccacgtaggcccctccctggaggggagagcagagcctgggtgagggccctccaaggagccacccctcccaactacagagacctgcaggggcttcctcacttagaatcattctggaaaaatcccacctgggaccgaacgtgagtaccccagaaactgcctcttaggccaggtgcggtggctcatgcctgtcatcccagcactttgggaggctgaggcgggcgtatcacctgaggtcaggagtttgagaccagcctggccaatatggtgaaaattagccaggcgtggtggcacacgcctttaatcccagctactcaggaggctgaggcgggagaattgcttgaacgagaggcagaggttgcagtgagctgagatagcaccattgcactccagcctgggggacagagcaagactctgtccaaaaaaaaaaaaaaaagaaactgtttcttggactgttcttggactggcctttgcagtggcagtgtgggcaggttttacccactcagacgcctcttcccatcctatgtagttcattcttctcatttcttcaccccactaaattttaagagacaaactccaaagggccttgggatctattttaaactttcttcaacttattgaacacctgctgtggacacgaccctggagaatccctgcctctaaagactgaatccagaagggcccaggataccagacacattaagggccttggtcacagttttgcctttctgtcctaaatcatgactcactggggttccactcagtccccttgacccccactccagggccatcggggtcacggcttaaagatgcacatttgcaaaatctgccttagagtatttacttcagctaccaaaaaaaaaaaaaaaggatctctagagagggtgtgacttctttaccattgcaaattctggaggagaccaagcggcattacacacatgacgtgaagaacgtcagggcagtatcctcaagaaagcagctctaaagagtggaaataggctggaaaagcaaatcctaattttctccagatagtttttgaagcctgaaatctagtgggatctgcggtaaaatgctgacagcccctggatactatgcacggaatctgcaagtagatgcacaagaaacaacttttcttctccttgatgacaaaccttttaatgggagtaacaacctcccctcctttggtcccaaagccagggcactgtgtgagatggaaggagacgaacagcttcctgtagcgttctgctgccctaggggaggccaactcaaagctgaggggcatgatactcacaaaagtcagggtgaccagggatccaaagaagcaggtgatgaccacggcgagcacgaaccgctcccggcgcttggcccagacgtgtgggaactcatccagcacagccgtgatcaccccctccaagcctgcaaactgagaggtacaggcaagcagtcacggtggaggctttgggacaaggctgtggccttcaggacagtgaacaggagggaggggtaaggttgctaagtgactggtcaagctgatcatcaccagttccccggctcgctggaccatgtaagcatctcaaagagtatttccctgttttacactgtcatttaaagcccatcactaaggagagccaggaaacaaaatagcacacgtggacagaacttcaatatatgaggtctctcggggagactccgtttgcaccagaaaggccaactcaaagctgagactcactccacactaataattccaggccctgaactgaacccttggcaaagcagagacccaggagagacctcgccccggcctgtaggcgccataattgggccaagggacagtgcttaataacagttcacatatgtgagccttgggcctcataagcgcctggcgcttgacccactttatcccattaatgactcgaatgtaccagagggtggtaaatgccgaggagtcagccgggggtctggagcaccagaagggagtagccaaagctgcctgggatggccagggatgggagggaattgagtccagctgagtcctcctcctttcctcttcatcctcccacagcccatttccccttcccatttcctcaccgtgctgtccaagcccagcgtgattaacatcagaaagaagatgatggcaaagaaagtggacgctggcatgttggctatcgcttctgcatacgtgatgaagaggaggctgggacctgagacagaggggagagaggaggaggtggttgacaagacctgtcctacaaagatgtcacagaggaaaactcagccacaacaacagttacaattctcatcacaagaccttatgtgtgaatcaggttttgacacacaccaagtgcgtcctcacactctactccgtctgacgtggccaccccagttcctgggaggcaggaagggtggggcttccatcttgaaaactgtgtgccctccattaaccctgggggtgggtaacagatccaagacccagagactggcaaagctgcacatgagaataagagtttccaccatataacaattccatgggatttctcaggaccaggattgatatttctaaagtccatgacagttagccccctctgatgtcttcagcttcagaacagtaggaaatgttaaattgatttccgtagagtcacagaggctttggaataaagacctctttctattttaaagtcccttttgaaagtgtgagggacatgtcttcagcctctcatgggttagctaggggtgccctcgtttggggtatggggttggtcaaagcaccgaatcaggccaaagatacaagcatgctaacatgcttgtaacaagaaggccctgggacctcgcccactagatgccatcatctgttttttctccctctgttgctcttttctttttccacaaaaacttcacggtaaaatagagtggtcatattggctagattttctttttctgcaaggggcagttctaaggataaatgatatttgcttactagactttgagccatcacaagaccatcacaggaagcaaacccactggttttaaagccatcatcagagtcatcatttcaagcccatagattttggaggccccagaactgggtgccaagggagttgccctgtccctgcatggcctgaacacatggaaagatctctaaggcatcgagcttctctcaaatctttgaataaaaaatgttttggaaacagggtcttattctgtcacccaggctgaagtacagtggtgtgatcatggctcactgtagccttgacctcccaggctcaagcaatcttcccacctcagcctcctgagtagctgggactataggtgtgcactaccatgcccagctcatttatttttttatagaggcagggtctcactatgttgcccaggctggtcttgaactccaccatgcccagccttctttggaaaatttcaggaacatttagaaataaatcaaaagttagatctttacaaagattcaaagcaaagcaactcagtaggagcaagggacctgcatagaacccgaggtcctacctgcgtctttggccacctcagacacatcttcattcctcatctcagccatgtaaccgagcactgtgaagatgacaaatcccgaaacgaagctcgtcatgcagttcaccacgctggtcaccagggcatctctggaggggaaaacccaaggggccgcctgagacagttccaagatcaggggtctaaggagcatctgtccgtgtgcctgccctgccttagacagggcggccacagcaaggacaagcaggctgaactcaaggaacctcaagcctgtcccggagtcccttcgccttctcccagaacccagctgccgaggcctgaagctctgactgccatgaccaccacacatggtggagggagaagagcagtcaggggtgctttaaaaggcaatcctgctagcacagacctctccatttcaaaccagccttgttctggagcagggcccaggttggagtgggggccaggacagggcctgagcctcacatttgtgagatcctcagatttaggctttatcttcaaactaagtcacagactgccagccagagagataccctcatttttttttcttttttttttttttttttgagacagagccttgctctattgcccaggctggagtgcagtggcttgatctcagctcactgtaccctctgcctcccgggttcaggtgattctcctgcttccgcctcccaagtagctgggattacaggcgcccacgaccacgcctggctaatttttgtatttttagtagagatggggtttccccatgttggccaggctggtctcaaactcctgatctcacacttttaaatgacagcctcatcatacaactgcagggtggtgtcccagtgcaaggccacattgcttagggtacatgtgaatctccctcccacctttaaaaaaatcagttttacaattatcttatgcatagcacaaagagattgatggatgctgccatctgtgatcaattaaaattaagtctaaagatgatgggtgacatttatttatttatttatttatttatttttgagatagggtctccctctgttgcacaggctgaagtgcagtggcatgaacacagctcactgcagccttaacctcccgggctcaagcaatcctcctgcttcagcctcctgaagagctgggaccataggcatgcaccaccacactcagctaatttttaaattttttgtagagatgggatctcaccatgttgcccaggctggactcaaactcttaggctcaagtgatcctcctgcctcagcctcccaaagggctaagattacaggtttgagcaactgcacctggcccagtgggtgatatttaaaaccataattggtgtaacatttcctgttctgttaaaatttctgaaataggattttgttgcaaaaattatggcattttggctgggcacagtggctcacgcctgtaatcccagcactttgggaggctgaggcaggtggatcacctgaggtcgggagttggagaccagcctgaccaacatggagaaaccccatctctactaaaaatacaaatttagccagtcgtggtggcgcatgcctgtcatcccagctactcgggaggctgaggcaggagaatcgcttgaacccgggaggcagaggttgtggtgagctgagattgcgccattgcactccagcctggacaacaagagcgaaactccgtctcaaaaaaaaaaaaaaaaaaagaaaagaaaagaaaaattatggtattttgtgttagtcaaaataatgtgatcatcatactttttgtttatacataatacaaataatcacattacaatttttattgttaaacacattgactagttaaacctaactacttaattgtatgttgcagctttttgtaaacttgctttgcaatttctctttctttctttcttttttttttttttttttgatggaatctcactctgtcgcccaggctggagtgcagtggcacaatctcggctcaccgcaaactccacctcctgggttcacgccattctcctgtctcagcctcctgagtagctgggactacaggcgcccgccaccacgcccggctaatttgtttgtatttttagtagagatggggtttcaccgtgttagccaggatggtatcgatctcctgacctcgtgatccacccgcctcggcctcccaaagtgttgagattacaggtgggagccaccgcaccccgtctctctctttctttctttctttctttccttccttctttcttctttctttctttttctttccttccttcctttctttctttctttctttcttttttctttctttctttctttctttatttctctctctctctttctctctctctctttctttctttctggaatcttgctctgtcactcaggctggagtgtagtggcaagatctcagctcactgcaacttctcgtgcctcagcctcccaagtggctgtgcttacaggtgtgcaacaccatgcctggctaatctttgtatttttagtacagacagggtttcgccatgttggccaggttagcctggaactcctgacctcaggtgatccacctgccttggcctcccaaagtgctgggattacaggcgtgagccaccatgtccagcctcttattatttttatatacaggagcgctgacaaaaccgaagggcatggggcccctctcagcctgagtggcccaggtgaagccacggcctggatgagtgctctggccatgggtgagctggtcaggggcctgcagcacccctgaggggcagtggtatcaaggcctaagcctggccagattcgaggccgtcggtccaatcaccttcctccacactagctgactttcactcacgccactttcaagctttgcttggggaccccagatactcactggtagcagttgttgttgaacttgttgtagctagcaaaagccagcaggaccccaaagcccggaccaagagagaagaagatctgagcggctgcatctatccacacctggaacacagcaggggtaagggcatggggtgagggggagacacaggcttaccctggcaccaacagggtcgccactcctgcctccatgtggctaagtgcagaggcagaaaaacagcttttaaggctcattccaggcatagccataaaccaagtgccaacaaatgtgatttctcttcctatgattcaggcataaacccatccagtggcctcaactgtactttaatgcttgtatttcttggttaaagtatcattgcagacttgcacactgaagccacatttcagttgtccctactgtcctatttggaggaggaccagcttcgtttagtaaaatgacagacaggtacacatatttccctcatcatcttacccctgtctccaggagtttctgccaattgggtttcaagtagaagagaacacccctccaggctccagggagggtggcacccctcaccagcaggacagaaaggatgatataagggaaggtggctgtcacccacaccacctgtaaggaagaagggttatcaccatgctgttccagggaggggaggggaggggaggggagaaggagaagggagcgggggaggggaggggaggggagggaggtgggtgaatggatgtcagtgtcttttattcttgaagaccttgagaaaggagggcgaggtggtgtggcagaaagatcacaacccttggagtcacacagggatcggattcaggttggccaggagaactacctctgagcccactatgcatctgtaaggttgagggagtatctagcaggaaacaatagcactggccagtgtataaaaagcactgaacatggtccatgatgggtttccagtaagtcattgccacgattattaattgtggtactaccagtgggttgaaggaatcttgaaaaaaaaaaatcatgtaatggttcttggcattggcccatttctagaaaatattcttttttcttttcctttttttttttagtgagacagaatttcactctgctgcccaggagtgtaatggcatgatcttggctcacagaaatctccacctcccaggttcaagtgattctcttgcctcagcctcccgagtagctgggattacaggcacctgccaccacacctggctattgtttttttttgtttgtttgtttgtttgtttgtttgtttgtttaagtagagatgaggtttcgatgtgttggccaggctggtcttgaactcctggcctcaaatgatccacccacctcagcctcccaaagtgctgggattagagacgtgagccaccatgcccaacccacttctagaattttctaacaaatgcggtgaagagagagagggtgcatcatggaatgtgtttggtgtggaaggaaacagtgctgtctgtccaggctactgggttttgagtttgagagcctgtgggcccctgggcaggcctgggtcagcagccagagccttcctcaccttgccagaggtcttgacgcctttccagatgctgaagtagataacagtgaagatcagcatgatgcagagggccagctgccagctgatgccccccaggtcctggagccccttagaccggtggatctgcaggacgtggcgcctggggtgaaggagaaagaaaggcccctgagaggctctgtagagtgacctgggcacacatctgtgctgctcctttgagggtgcccgggacaaatggacacggtgctgctaggaccaagtggtcactgaggcccaggaagagctgggattggccctgcctgtcctgaaggaccacaaagcacatttggccaacaccctgggaagagtgttcaacctaaaggcagacttcctggattctcctttgctggatgggacctgaactcctttgaccaatgtgactggcttttgggaacatgagggatgtgtaagtgtggggagttggctcccttccctaccccaaagtagctctctctttgggctgccattgcctgaaattccagcattaaagaaaactaccttcctcaagcatcttcttccaaagggtagatcccacttacgaagttgacacattaaaccatttgaatagttttgaactatcaaagtactaggatgcttcgcctccatgacatttggctgagaggaggaccccggaagaaggggagtaattttggaatgtgaagggagggacgggcttgggcgcattggagcaaactgacttggcgcatgagaaagtgcaaggaggcacagcagggccaggccgtggagcacttgaggtagagtttcccagctccaaattctgctactcccacccctgatagcttcatctctcagaaaggggtgaggagcccttggccctggccttctttttaagaagccaaaccccaggggtgtggcctgcccctaacaggccaacccctcacttacgtgcacttacgtgtaaaattcttcagcaggggacgtggaatggagggtccaggtgatgttgtcctcggagaagtaattggtgcagttgccagtgttccaggagttcttgcagctggtccagggcagctggtccgtgaaggaggagatgaggtagtatagcgcccaggccatgatggtgttgtagtaggaagcaatgtaaaaggcaatgatgcagatggcataaccaatccctgggcagtgggtgagatggagagacagaggccgagtttaagggtggcccaacggcaaaaggctgaaacggggcactggagagccccgcagcccagcagaggggtacacgtgggtgctgccctccattccattccaaggactccaggccaccgtgggaaaagtggccctgccgttagtcactcatatgtatttgcaaggtaacatgttttagaaaatgtgtacatgtcctgttaatgctttaaaatgtttacattagtttacttctcattgccgtttattctgtttctctttgacaatttcacaccacttacgcagtcaaaaccttaattactcaagcagtctcccagggatgcctaaggcctgactgattccagaagaaggtccccagctcccacccactgatggaaatcccttcctgagaggctccacttacccaccccaccgagcccttcagttacctttgaaaatcgggcagattttcctccatattgaaatgcatccatttcggtggtactgtcccagtgcgagctccatgtaaaagagcgggattcccccaaaaatggccatgatggtgtaggggaggaggaatgcccctgaggcagatgaaagacaatttcactccctgcccacgtctgtcccaggatagcccaaccaatctgtgactgagaatcacagtcgccggatgatgtgagtgtcaggagccaccctgggctgagtggcctcatgctgtgctcctctggtctcagtgctttgctagaagcagtcgtagggggagcaccatgactaaaatgaggtttcagaggaggccaagagagcaattgggaagaaagcctggtttgggagtcgacagaacaggcaggatcacatccacttatgactacctggagaacgctgggccacttcccctctctgagccccaatttcctccctataaaagaacacagttgaggagagctgagtttcccaaatgtagccacacatcatagtcacctagattcctgggtctaccccagacctcctgaagcggaatctccaagcatgggcacaacacaaaaattgtgttcaagctccctaggtgattccgatgcagccagtacctgggacccttggaacagatcacctgtgacaatctgtagcaacagctgcaactctctgtgagtcaccaaatcagtatctttgttcatcagtattatctatggctccagacacatgattattgatatttggctacacttccataattccattgagccagaatgctccctgacaagcgccgtttgcaggagtggctggacagggtagtttttcacagaacaagcaagcacagagctgctacctaactggagatgctggtgtctcctggatcttgtggctgaggctgaatttaaaaataccaagttggggaatgctaacctgcagcctgagtttttagcctaaagggtggatcagctgtgattttccctaattttccctgctgtaaaatgctctgaacccagaaacctgaggtctgtgcaaatcagaaaggtccatgtaatttacagtcacactgggtaaacccggctcgagaataaaaccatgtgttctcgtgatggccttcctccaaagagtttgcttgatcagctttacgctggggaatgagtgtcggggaaatgtcaccagtgacccagccccttacataatgcccaggctaaaggtgagtcctctggagcaggagataaggtgattatgacttttgctcctcctaggcaggaagcgctgagcttcccaggggccccctggaactacctttgcaactacatggacagaaatctttaaaagagagtaaatccaggccactctgtgttaggtcacgggagaagtgagggtgacacaaatggatgatccccaaacctctttgtagctgccctcccaaatctgttgtcagagttcccatgaaaatcaagcttgacgcatctgacacccacttcttgttattttcttgtgctgataacaagtccagaggccccaaacccattcacttttccccactgctctgctctcccccaggttcccatcttcatgcctacagtcagctactattttttataatctacaagttaactacttgagaggctttaggggtacaaggaacaagatagggcctctggcctcaaaaatctaacatcccaggaggagataggagggccagccatgcgtggtttgaggttggtattaatgtcatgctgtggatctaatccagcttaaattctgcccagactggtaattaagatttaggacttaacgctgatgcccttctctgacctcacacaggtccaaaggatcagaagcatctgggactctgaagccacctccaaattttcccttacgcaggcctaccctcgtggactcttcccagcagaacttgccagcaggagtgaagggactcagcacagggctgacggccattccctcacttctggctgggggaggacagagcctggagaatgcaggatgagaaggaggcccttcaataaatggagcgctaatgatgctggagatctgtgaggtcaggtttgggagggcttcacccagcttcacaacccggagagcctcagacacgctgtcttcagcttttggcttgctggagatttgactttttttttttttttttttttttgagacagagtctcgctctgtcgcctaggctggagtgcagtggtgccatctcggctcactgcaacctccacctcccaggttcaagtgattctcctgcctcagcctcccaagtagctgggactacaggcgcccaccaccatacccagctaatttttatatttttagtggagacggggttttgccatgttggtcaggctggtcttgaactcctgacctcaggtgatccacctgcctcagcctcccaaagtgctgggattacaggtgtgagccaccacgcctggcgagatttgacttttctaccagctcgaaagtctaagtcatcatgttcctagtcttacgccagtgaagactgaaaagacataatctgtcttctggcctctcaagaggacctacagcccatcccaggtcacagcccacccgggtcacagcccaccccaggtcacagcccacccgggtcacagcccaccccaggtcacagcccacccgggtcacagcccatcccaggtcacagcccaccccaggtcgcagcccacccgggtcacagcccaccccgggtcacagcccactccgggtcacagcccaccctgggtcacagcctctactcgcagcctgtgatactgaccccctccattctggtaacatatgtaggggaagcgccagacattgcccaggtccacagcatagccaatcactgagagaaggaaatccaccttcttgccccaggtctcccgttccccttgatgaagctcagccactagggtggtggtggtcgctgggatagagtgccgtgtgtcatctcccgcaccaggacttggaactgctgagtacccattggatatttgcccggactccactttgtcccctggggtgggaacaaccttctgtagaactccgttttcctgacaatcttctccatcttcacacgctgatagctgcttctgagaattcaagggcgtcgtctccatcctgctggttagtaaatgacactgatgtccatctgccaaggatcccaattgatctctgggtgcttggatttgtggatcacctccgagctctctatcgtcgggattgacacgtcgggattgactctgttggaaagacacacagaggaaggagaaaaaagttagacattttactcatctttggtattaactcatcatacatcttaaactacattagttaacgggattacaaatgcatctgttaaatgtgagacatcctatttgctacatggcagtccataaattcaactaaatttctcaacctatacagggcatcaaatgacaatcaagtaatttcaaaaggaaacaataaaaccaacacaaatagacagcaaatcaccaaggtttgcacaggctggactggagagcaaagcactcgcttccctttgagccactggactctcatcttgtggtttgccagcagctcagaagaatgtgagagaggctccaaagcgtcacagagcaccccctttgtcttggatgctatgttggggaaacaatgacaagcaaaggcgtttctgcctttcagcaggcaggacagtcctcaccatcatttaagctgcacacccaaagttatattttatatcaactacagctatgattttaaaaggaaaaaagcaaaggacagaggtaaaaaggccacccttcgtgaggcaccccagctcatcagctacagattctgtcactcgtcttttagcccctaggaaggttggggcagatttgagctgcctccggctgtgtccagtctatctgcacatggcctttctgcgttcccattatgcatttgcaagcccgactggtccttaaacggcactgctgctcaccatttgttcttctttccacttgccagcaactcctgtggctaagccccttgttattctgcaagagagggcaagcaaggtcgccttgcctccaggagacctagggagaagagtgtgcaggttactgatgctggggtggttggtgtcgccgtccccctgtgcctccactgggagggcctggccggggctgctgtgccttcatttcaccgccgtggcctgggcgcagggaagtcagctcagctctggcttgaggtctgagtcgtcaaacgtggggtagaaatttgagcccttttggactttaaacctatggcctgttataaagttgtaagcagcagttgtaagactgttcaactgctcactctgtttcttctgggcctgagcttttcaaactcttgaaacagtttgggagttgaaatacgtttctgcctagctgagatgacactggacccttctagaaaagatagccagggatggactgtttataactgcaatgatctgaggctaaccctccagatccaacagttaggaggatggctaggaactggctaatagaaatggcgcatggatgtctcctacctatttggggtttttggtgactgcaacttagctacctacacatgtgaagacaaaaacatagtaagtgaaaaatcaggacacaaaatagtagcttcacaagaatgactatggctataaacatgagcaaggattagacatgaacaccaggcaatgtcagtcactagggtttggcgtttgctgcattttttctgtaaagtggaaaataaaaattttaaagggatcgattgttgccaaaaatatctacagcaacaagagataaatcagcttcatgtagctaggggctgtgtgtgtgtaaggggaggtagacgtcttgggctgtaccgcacttgttgggccctccgccacccaccccaggctcaagaatgcaaacaccactcagaaggatatgaattctgacaagagcggtctccataacctcaccctgctcaccatttatgctactgcctggccttggcctccccccacttcccccttccttcggccctcaactaggcttgataggcttttaaaataaccacacatcctctcacccaccataggtaaccatttaccaggccaagggatattattattttattacatgatgagatgtcaacatatttaaatattcagctaaattaaacctgaacttggtagtcagtggttgtgttgtttaaaaaggcctctgtacttccctccggcctatatcaatgacatgttttgtacgttaaacaactgacgaacttgaaggccaaatggcagggaggaagagcttttccctgtgcggctggagggcaccgagttgacagagctgctccttcccttgctcttcctcccactggccccacagttttgtttttttttttttgaaacagtcttgctctgttgcccaggctggtgtgcagtggcacaattttggctcactgcaacctctgcctcccgggttcaagcgattcttgtgcctcagcctccgagtagctgggactacaggcgtgctccaccatgcccggctaatttttatatttttagtagagatggggtttcactatgttggccaggatggtcttgaactcctgacctcacatgatccacccgccttggcctcccaaagagctgagatcacaggtgtgagacaccatgcctggcctggccccacaattttctgcaagaacctcttctattttctgtactgccactttcctctcacttaaatagaagctccaattgcatcacccaagcgttccctggcctctctacccaggcccagagggtctacggaagggaaatgcggtccatctcagaagcaatactttggggagaggaaatagacatttagcagcagcagtgagcagttaccctcctgcctcaggggccaaatgatttgttctggattttgtttactttcttccttgaggcgtcctgcagagagggtagaaaatgtgtgcaggtaggtagatttttgagggcaacgtgtgttctcaggagtcctcaggggttcagccccgaaggcatccagtcctgaattcctggcaactatggtaagcagctcctggaagagtaatacgctgtttctatttgtgttctgagccattacagaggtcttgtttcctgaaatatcccctagttcttcttaattttttaattaaaaaattttacatcaacaggctgaaatggccccagtgcaagaaaacccagagcatccctcagacaactcatgaccgggcagcctctccccacaggctgtctctctctatccagctgtgctttctggggttctcctactgaacccccaccctcatcatagaatctggggtgcaaacacaaagttacagccactcagaggagacacacatctccttttcttaacttactcctctgcctctgccaggtagaggaaaactcctctcggtgactaatcgggtctgccaggagaagatgccatgtgcccggggccctttctgcctgcaagctcctgcctgtggagccccagactctcttcctattttttctgattctgcagagccctggctggctttttctatcaagacttgcacataacaatggctgaaaacaagctggcccaggaatagagaagtgtgagttgttaagaaggttggtttctgagaatgccctcttctaagctttctttttttaaaaggtatttttatcctgctgggtggaaagattgcaaacgaggtcaatattacagctgtgaccttctccaggcagtctttgagtttctccatgtccagaaaaagccccagaaggaagccttcctttgcatcttggatgtgtgctgttgttccaggctgagctggtgacaggctgagggtggtgccgtggaccccacctctgctgtggaatgacagctggcagacagaagcttcgtccccctaggtctctgcacatgaggggtgcagttgaccagccaatgggagtggttgactttctcttaactctcctgaagctaatgcactccattcccccaatccctgactccaagtaaaaaaggactgtttctatttaaacttctgatcgaatctccattcctctttccacacactttgtctctatagccaggagcaacccgtacctgaacaagcatgtaattatcccgattggtcataaacacccagccctttggaaatgcctgtgacgctccatctacttgatgcctatcagtgccttctaagcagaaagacactacagaaatgttgaactttgacttcatgtgtcaagatcaaagtgagttcatttctcaggaaactcaactttctttctcaaaacaaacaaaaacaaatgaactgtgggtttaacgttgagataggattagttacaggtcatagagccaactggcagttcgtatcctctattcagagggaggctgaagttcccagggcatctcccaagagtgatgggaattatggaacgctggtgccgcccgaagcagtaaacatggaatctggccttcttcatggagaagcactccctcagcaaagatgtgcgtaggcccacatgtgctcggctcctcagaaacaaggcaggcaagccgggccagctggctcacgcctgtaatcccagcactttgggaagccaaggcgggcggatcacctgaggtcaggagtttgagaccagcgtggccagcatggtgaaatcctgtctctactaaaaatacaaaaagtagctgggtgtggtggcgggtgcctgtaatctcagctacttgtgaggctgaggcaggagaattgcctgaacccaggaagcggaggttgcagtgagctgagattgagccactacacttcagcctgagtgacaagagtgaaactctgtctcaaataaataaataaaaataaaaatacaaaaaatgagccgggcgtggtggtgcatgtctgtaatcccagctactcagaagactgatgcatgagaatcgcctgaacctgggaggcagaggttacagtcagccaaactgcgctccagcctgggcgatagagtgagactctgtctcaaaaaaaaaagaaaaagaaagaaaaaagaaacaaggcaggcacagtcctgcctgcatggagtccacaggccaagcctaaaatctgaaaaagaaaaccaactgctaggaaaaacacgatgcttctggagaggctggtgctgccacacatcccgtggtgaacagaggctgccgctggctcgccgcggcgtgtttagatagctcacatgttttgcaccacagttgcccccaggctttaagtcttcctttgctgctattgcacagtttctctcacaggaccttggctgttggctgatccttccttgcaggctctgcagtgtaaaatgggggctcacgtttgcatctgctgaaggcactgctgtgttcccgaagtgtgcagggtcatgggggcacaggtcggaagccatagggactcctgccttgcctttccaatgaattgaagagatttcatgatagaaatgaagagaatagagaaaatctgcttgttttttttttggacaaaaagggtagaaatgaactccactatcacagccatctccttatccaaaggattcctcatatgacagagtcagtttagtgttttttctgttcctttgtgtgtgtgtttgtgtgtgtgtgtgtgttgtttttttaagagacagagtcttgcactgtcatccaggctggagtgcagtggcatgatcatggctctctgcagcctcaacctcccgggctcaaggaatcctcccacctcaggctcccgagtagctgagattacaggtgtgtgccaccacacccagctaattttttgtatttttttcagagatggggtttcaccatgttgcccaggttggtcttgaactcctggcctatgagcaatcctcccgccttggcctcccaaagtgctgggattacaggcatgatccactgcacccagcctggtttaattttttggagaggaattaaataggataaaatcctcagggccatttgggccagttatcatgagaaagaaaaagaatttctgtccagaactttccctgcctgggagaggatagccctgggcttctctctacacagagtataaaatctagaggatatgccccttgtgatggggtcaaggtccccctgagaggctggccaaaaggatactggattatttattttgactttactagaaagaaatgaatttagcatagcagatgtgaacagccctcctccagtgaatataaacagccaagcccagactaacttccttccagagtcatctttcattagttcctctgttcacaacccatagctctcctttctgtttcaggtctgcactggaatccctggtccaccacttaatggctgtgtgactttgagtaggtcacttaacctctcttagcttccatttcctcctgtgtaaaagcagactgttaaaaccgctacttcctaaaggctgtcgtgggaattaaagtatgacacatgcttatctcagtgtctagcacagggaagcatcaataaatgacagtgagttgatgtcactatcaccaccatacatccgcaacccattgtgcctttctacttcataccctagcagggaaactgaggcccacaagacttgggacttaagtgatctgtggctcccagcacgggcctcactgggtcatgcttgctgctctcaatcagtgcttggggtcacctgggaaacagactcctgggctgctctcccagagattctaattcaagagatccacgtgggcactcagggatctgcagtttttaacaaataccgcaggttattcaggggccagtaggcaccaacagtgccgtgtgcgtccccacctgtagcttcccttcctctaattatcctgcaccctccaaggcctggcataagcttctatccacctcctctcagcactccagcccaagatacactctttctactcaattctcatttgtcactcgccattgattaccaggcatcattagttatccttttatatacatttgcttcgtgtgcccctggaagcaggggctatggctacacgtccctgagtccaaatacttgcagactggagcacgccctgtacagctctcagcatggagggcttgttttgggtttcctgactgggcgagggtgccaacagatctgagctccatgtgaggtgctgctctttctctcctccctggagttaagtcaaatgggatcagggttctattctaaggggccctgtccctccctgcctcacccatcgggaagattggctgtgcatcttgtgggcagaggaggagggctgccttaacagtcattttcatggactatggacaggaagagactgacatgcccaggattaaagagcccgggatgggctttcagactttgaaacaagtactggcaggcacacccatcagcggtctgggctccaaatgttcatctgtgagctggtggtttggaacttagaatatatttcctaacccacagaaataaatgtgataaactaaaacatctgaaacgaaagctgtagaacacagcgttgttaagtgctacacgacggcttaggggtggggagggggctgacaatgagactgattcgaagttctttctttattttaaccttctttttggttcttaaggaaaactaaatttaaggaaagaagaacaaggagcagggagatccttgtacagattccacggaggtgtcttttaggcacttttgaggtctttagttttgtttgttgttcaattttaaaatacacagtagagatgagatctcgctatgttgcccaggctggtcttgaactcctggactccagcgatcctcctgcctcagcctcccaaagtgctgagattacagcatgagccactgcgcctggtccaagttctttagaagttgatgacatgggctgggcgcagtgtcacatgcctgtaatcccagcactttgggaggccaaggtgggcggatcacctgaggtcagagttcgagaccagcctgatcaacatggagaaaccctgtctctactaaaaatacaaaaattagccaggcatggtggcgcatgcctgtaataccagccttttagaggctgaggcaggagaatagcttgaacccaggaggcagaggttgtggtgagctgagatcgggccattgcactccagcctggacaacaggagcgaaactccatctcaaaaaagaagaagaagaaaaagaagaaagaagaagaagaagaagaagaagaagaagaagaagaagaagaagaagaagaggaggaagaggaagaggaagaggaagaggaggaggaggaggaggaggaggaggaagaggaagaggaagaagaagaagttggtgacatgaattgcttgtgacacataatttcacaacttacaactttttgcagaaaacaaaactgcttttactctgttaccatagtatatttaaatgtggacgaggctgggaaagagacttgagaaactcaaaacagatgatgtgttagattaatcaggattaggagtgtcacttcaccttccaaacactcctttactgttgtgataaatacaatttatgcaataagtaaaaatcgagatagaacacatgggaacatgtccacacacagcttttcttttcctttatacaggtatgttactaagattacctttgtgtaaaacagacatgattgggtccacaaagggacccaaaacagagagaagagaggaaaaaacaaccccagggagagggtgctatgaaataagggtggattcacctgtggctgctgagcaaggcggaagagggaagtggggaaaagggggtttgaagtggaactacaaaataaaatgggagtggagaagagaaaagagaggggaaactggcccatttctctgggtggggcatggaggggagaaggagaggtgaggtcaggtgaggtgaggctgctggaggagacgggtgcatccaggtggagagggggcgcggaggacacgtgcaaccacctcttcagccacaaggtgtttggagtttggctgttgctgctcaaaggtgcctatactcttaggtcaacaatttctgagatgtgctttagtgtgagtcacacagttggagacactcatgaaaaatcagttcatccttacacatcattgcaccagtctagttctcagatatgcactgagatgagagcaagaaaaactttctgacccctagtttacagtctcacagagtaacactgtatgctaaaaaggacatcattgagacagcgggggaaatgggaatatgagctgtatgtgcgataatagtattgtatctatctccagtttccccagcatgaaaatggcgctgtggttacgtacaagaaggtccttgtttgttggaaatctgtgttgaagtatttaaggaagaagtatctggaagtctgcaaactctcaaaggttcaactatatatattagttgaacctatatatatagtatatatatacctgtatgtatacctacagatatatatatacacactatatatatctgtaggtatacatacagatacatatagtttatatatacatatagtgtatacagacacatatatacactgtatgtatctgtatgtacatatgtatatatatatctgtatgtatctgtatgtacatatgtgtatatatagtgtgtatatatatctgtatgtatacatacagatacataaatggcataattatattaatgatcttatatattacacataatatatcaaatcatatatatactgcatatgcaaaaattagatatatgcataattagagtgactttgtacacaaattggcaaaatgttaactggtgaaaatggaccatatctctgatttttcagttgaaaattttcaaaagaaaaaataattctagccctcagccagtgctgggaaacttccagtcagccaaagctccctgctgaccagaacagcttacctcccctctcccctccaggctcttccctccctgttccttcggcccagctccccaactctgaaacaagagaaagggccagctaatttggttcgccttttaaagaagacatgcccatcattacggagggaagagaagagagcgaaagtagaagagactcaagttctaggcctggctttgtcctcaagagccgtgggtgagctagagccagccatgcacagagctacggggagcagaacccctccctggtccttccaggtctcccactcactaattcttggccccttagaggaaaaagttcccttagagaagacaaatcagcttattttattcaacagttcagtaacaaaggaaatgaaatgctcttttttcctgtatacacacagaaaggtcacaccaaaacccaagacggcaaaggcccacgtacttgccccctcctgctagctgcccacccagtctggggctctgggctctcccaaagcacacaatgggttcgctgtgtccccagctttgctgagaagtgctcgcccagatcaccacctggtctcatcataacccctcctgtcacctcttccctccctacctcaaagaatgacctgaagaactggacatcagcatcccaggagaccctccccttgctgtctgtcactcgtcagtacctgaagacctgggacattgcctctctgtctccacatcactgggttgcgtctctccttttgcagcccaggggcttctgggattaatggaggtccatccagtcctgggtgctaaagagcctgtggcttaaatcccattaacaaatccccttggttcagggttgggatggaagctggggagctgctgccaggttccagaggggccaaaggaaagatggaaataataataaggcagtcagactgcctcacatccactttatcgctactcattttgtcacctcattagacacagggctgggaaaacacttgctcccatttaaaagcgcgttgttgacattcagtaaatgagcattcgtcttcccagtcacccagagcaaacaaaagtcaggctgaagggagcagcccctgcagagacgtttctcacagggcaacatttctgaatgtgaaccaaagtcagcaccgtgagctccacctggaagtacggggctgtgcaggccaatggtggagcccgtgcccacctggaagagcaatttgcctttctgctcagggaagatcattgatgccaggtttctgtgaaaggctagtttcatctgttttcccctgggtccctcctagaaagatgggagttttcttcccttggaatgtcattttgcctggttaagcccagaaacagattccctgtaagagcaagggagtctgcctcacttgtcccaagtgtggagaaacaggcgcttttatgagatgtttcgctccacacccacgtatgttccatggaacaccgcaaacatcagggagtggaggtggctgttaatagcccagggactggacaggaaaatcggtgcagcccaaatttgtgctgcctgggggctatttctaccgcaccacaccctgggcatcttgcaaagggcatttgggcagctggggagtcgggttattgggcccctgttggttggctgtggttaaggtgcaggggttaacttacttacatgtgtcagagtgtgcaaagcctctgccttagagtgaaacctgaggggatccccaggagaccctgatttgaaggtgatatctgggtagagagtaccggccctccggcatttttgcaccatcatttcaactcatgttttcttaaagtggagaggttagggtcatggttgcagagtgagttggaggggactcggacatcgtgttaggcagtcctctccacagcccctcatttagagctgaggaccacgaggagctgatatgttactgggaataactaaggtctgagttaccttctcaacaacaaccaaaagtgactgtataatttttgctctggctgtccagacatctttagaaaaagtcaagtcatgaccatatcctgttgattcatgaagccaaattaaaattaagcttcttcaggaagccctgccttctatattctctccaattataccattcattccacaactaggaaggagaaggagctgccacgtattggcttaatgtctggagttacctgtgtttctgtttggcagcggacatccagggtgtttgggaagcaagcacctgctgtaagaaacagactgatccatgctcctaacccccctccagccaagcatccccattcctcaggcacctcacctatttgcgaaactcttcaacatgcctctccaagtttcatcaaaatgctcagacgactctaaacatcccccgagaggaatttctgaggtctttcagattccattaaaacatcaacattattcccccatcccactcctagtatatatatatttcttaaacaaggagattgaaaaaaatgggtttgaatatctgtgctggtggttatatctctgagaggtcttagatggatcaccagagtgttgaggggacttttgattaattgtgaagcactttcaatctgttctttagtgggaaaaagaaagaaagaaagaaaagaggaaaaacccatgccccaagtggcttgctcaatttgcacaaacctcataagaacctgcttctcactcatccatattggaacggtcactgccaccccagagtgcgtggcaggaaaacccgaaccctggggcctcagtggcttcacacagaagcaagtaatgggacaaagagtcaaagctgtgtgctccctacgctcctaaaaacccaacactgacgctgcccacagttctctgtttcattaaacacaagtcccaatgtcaccttcttagacatttttcctatgtaactgaaggcaaaacacattaaatatttgctctcgtcttcctatgatgagagttagctagcaggctcataaataatccattgaccaggttcacttttctggacaaaactgatggtaaaaatacatacacaaagtctttgtaatgtctgattcagaaattctacccctctcaaattcttcagagtcccaaatggaaaaggaacaattcaatatgcaaaagccccagttcagaagaaaatctgctccttagcccaagacccaaatccactcttgagctccagagagctttttttcaagaacaagtttgaatgtacacaattttcaagcaaatgatggttatatccttcaaccacgtagcacagtcgttggagttggagtttcacatacattctgaatggcctgtgaggtgtctgagagcgcctcagctctgacagtgaaaccacccaagcgcacggagactcggcccacttaggcgccactcagagatttctctagctgtctgggcatttgtgtcaaccagaactctccctttgcataaagccacctgcacgcgatgacagcaaagtaaagatcaaacataaaccatgggttgaaacgaaagcaagcaactcttcccaaagcgcaggacagcactttgctcaagaccctctttaaggggtctttcacgggtcctcaagaggttgcaaagcccctgcaacaatagacaaaggagccccctacgcccgcccacttcgagcactccacgttcctcgtctcccactctggccggtcagcttcagctctggctcttgctgagcgtggagggcgcaggggcaggatccggcgcccaccgctggggcgcatgcacctcctcgcctcctcgcagggcggtggggcgcagcggttctatccccctccccgaggcggggaagaaggtctggaaagaaacgtgggttcgaggcggagaggaaaagcggacccacctgccaggctgcgcggggaggctggtcccgggctgggcaggcgggctggcctcgcgccctcgaggcacccggcggcgctggctgtgcggaggggcgccggcgcggccgtatttgtacccgcgggccctcacatggtctgatctctagatagccgccgccaaagagctcttgaagaatttttgcgtcactttgaggcgaataaacttaatgcttccccgcggccgcggctccgcgctcccgctggatggggttgcgctcgccagggaggggccgcgctacggggcggggtgcgcgcccgaccccagagccaggaggggagggacccccgacacacacacacgctcgcagggaggagcggagcgcggagcagccggcagggcagggccgagcgaggaatcctgactttcctgctctttaactttgcgggaggggggaggctgcacaaaggagcaggtgtgcgcctcccctgccgccccgcgcccacaggacggcacacaggggtctgctcgtgccgctttctcttgacctcggacacctccccatcgtccccatcccgaaagctgctctctctttcttcctgggacctagcagtactcgatacccatgcgtttatctgactgaccggctgggatgtgagctcagcttagaggcccttgtctaattcctctccgtccccagagtctcacaataaagacttccacaatgaaggaatgaagaactggttctcattttgttaaccagctacagttcaaagctgcgtcaaaaaggagcacagtgctttgggaggctgaggcgggaggattgcttgagcccaggaattcaagaccagcctgggcaacacagcaagaccccatctctagaaaaaaaatttttttaattagccgggcgtggttgctcgcgcttgtgttcccagctactcaggaggctgaggtggaggatcagctgagcccgggaggtcgaggctgcagtgagccgtgatcgaaccactgcactccaacctggtgacaatttgaattatctgaaagggcccagcaggagcctattgttttgaaccatgtgcatgtagttttgataattttttcaaaaagtttaaaaattgatttaatgttaatatcctttttgctaaaattatttaaaactttaaaaagggcacatgcagtacttgctttgggttgtccctgaggcggaaaggagagggctctacctctccccaagaggaggccaggaacgataggaagtagaagaccgaaaggaaatagcagtgacaagtttgcagctccagagaagccaccgccccttgtacttggaggaactgacccctgaaaactgtgcggccggttgggctgagcgtctagagggactgagctggacaaccacgggcaagcgagggcagctcccagcgggtggagtccgcgcgggattctggtgccacctagacgccagggcggggaccgcaaggtgggcgggaggcttggaggccgggatgcgggggaatactggtagggtgcaaggagaatgctggaggggtgcaggggggatgccgggggtgcatggggggatgctggggggtgcaggggggatactgcgaggggtgcaggggggataatgggggttgcaggggagatcctgggagaggtgcagggggatgctggaagggctgcaggggggatgctgggggtgcaggggagatgctgggggggctgcaggggggatgctgggggtgcaggggggatgccgcgaggggtgaagggggggataatgggggatgcaggagcgatcctaggaggggtacagggagttgctgggaggttgcaggggggatgctgggagggctgcagtagggacattaggggttaggtgctggcattcagagcggcaacgccaggcgggagaatccccaacaagcttgggaatttcacccccaggggcagcgcctgcacgggagtggggcctcctcctttcagatgaacacagttgtctgctgcctcccacgttccacttcttaaatgagcatgtttgtgctgtataggcaagggcaacagaaaacgcaaagtgtcctttccaggagggccaaaggaggggggcagggacgctgggaagaggcgccaaagcggaggacggctgcaggggtgacttcagcgcttggctaccaagaccaggtctgtccagtgtgacttcttagcacttcttaattgtgcagtctcgccacttctgatcttccttctagactctttctagccgaagatgcattcctgcccagcgcgcagcccctccctatggcactgccctgttctgtgcaggtgctgcctagagagtgggcaccctgtggacctgggtcaaatcccggcccccaccctgtactgtggtgtgggcttgaccgagctccttaacctcaagctgtctggcctttgtgtctctgtttgtgaagtagggaggatgatctcagtgggcactgcccagctgtgggtggggaaggggccaactccttgcaggccctgtgcgctgggcccttcctccaagggggccttcgacccctcctctctctggccgggtggtcccatctcctcccctcttgctccccagctgcgggcaaccaccattagcaaatgacattagaattacacagacggccccgccctggttccccctgcctccatggcagagtccgcacacaactggcccagaccctccccctctctctaaacaggtgtttctcttcctcctgccctgggtaccatcccacagagaggccaggcccacctgcaggtcctcacctccacagagccagcctctcttgagcagctccgctctgccttctgatactcatcgccacaagcaccttgtccttcctcggcctcccactccctccctctgagcccgcgccctgctcccctgcctggcggtcagtcgactgccccgccccgcctccaattcaggtggacaggcttcagcgtccactaccggggaagaggcagccccgcacccgtgcctccccccgcctctgggccgctccttcccagcctgagcctgaccgcatgaggaaggcacaacctctctgctccagagacctggagaggccgggaggccctgtcctgggcatggaaggcaggagggagccctgagtgcggcaggagggaagcagcgcttcaggggaaggatctaatggctgtgacctgcgtgggctgcaggtaagagtaggggggaagggggttgtcgtggtggttgggacagacgggttccttagaatgtgaatgcaggcgtcagctggtggccgcagggaagagatgcaagccagaaacccagcaggcacctgcgaagcttggtgctggtggtgtatagggacagccagggagatgtcaagggcgacaggtcctgggcagctgggaagaggctgcctggcaatcaccgcacagcaatagtttttctttgttcacctgcttgagcccagaaatagtggggcttagaagctgctctggggctcagaataaatacaagctttcactttaagaggaaaggggcacataaatatttacacctgccccaaacaccaccaagaaaacccacttcctggaagtctcaaaggccagcagtgagtcccctgtggagccagccaggaccgaaccatgcgaatcccaggctctccctccggaagcccttggtgccatctgtctgtcctgtctctgccctgtttatacaataacgaaagaagaaggcccacccctccttgtgggctttttctcaggcccaggaaaatgctgacaatattcagtccttagagtgtcatcttgctccattcccaccagcacctccccgacacccctggtttttcctgggacccccagtttttcctggcatggttctggtgactctacattcatgttcagtggcacctccaaggcaggacttgctgccactgtgaaccctgggctcatctctacggaggtctccatgggagcccctagcaggcccaccccatccagatgaagcaagctaaagggaactccagacaaggtccttttgggagtgcggggggtttgggggaggaacagatcaggttcagccctaagaaaggccagaaacatttggaagtaggttcattttgtcattggtcatttttcccagctccttcccctcattcctccagagccttctgcctttgctaaaccctcctcctagcaccccatcacccggtctcccacctccctctccccagccccaccatcctcttgacttgaactcccattatctctcagtcaggtattacggcagcagcctcaccacaccactcactctatgataacaccccaaacacccccagaagcacttgctgggcaaatgctaatgccaataacaataactaagacttttatagcactttctatctaagccccataattaattccctcagtcttcaccatgggcccctgctgcttccacaaccccattgagaggcacagtaataattgtttaaaatcagtaagtatttgtcagattagcatcgatttaagtttctgttgctaaccctgcttaactcattgtatattcagacttcacagataattttttctaaaagagaggaaaaggcaggagtggctgatgtggaaaggcccagcttgaaggatactcacacgtgaggagaaatcagggtgtaggtgacaccccagactttacagatactgtgactaccccacgatctatctgcaatctctgtgagccatggtgtagcaggacgagcctcagacaaaacccttcagatgccaggttgaagaaggaagtggctttattcggctgggagcatcagcggactcatgtctcaagaactgagctccctgaaaaagaaattcctggcccttttaagggcttaccactctaaggggtacacgtgaaagggttgtgatagatcgagcaagcgtggggaacatgactgggggctacatgcatcagctaacagaacagaaacttttgcaatgcttcctcatacaatgcctggaatttacagataacacaagtagtttaggtcaggggttgatattattattattattattattttattttattttattttgagacagagtcttgctctgttgcccaggctggagtgcagtggcgcaatcttggcttgctgcaagctcctcctcggttcatgccattctcctgcctcagcctcccgagtagctgggactacaggcacccaccaccatgcccggctaatttttgtatttttagtagagatgggtttcaccttgttagccaggatggtctcgatctcctgaccttgtgatccacccacctcggcctcccaaagtgctgggattacaggcgtgagccaccacgcccggcctattattattttttaaccaccagggccgggtggtggcgccaaggtcgtctggctatttatcttacttctgttttttttctgactttttgcttttttccttatcttctgtcttataaactaggtgggtcggaggggaggaggagaagggcagcaggagaagtggtggtctccttccttaagggtttatgatttctacttcctccctaggggattcccttccctgacttcatcagccagggccacactccagagggcagctgtttttcccttccacgttggtggagatgttgacgccagaagcacagagaaccagggagggccccaccgccctgtacacatacagctgttgcagcaccttggtccctctccgaatttcccaggctctgggttcccaagggacagggtgctgcctctctccatgcctcaacacctatcactgtgtgggcgcacagcaggctccataaatgtacacaccagcaatgaagggctaggaaaatgcctctgagtcttaccagacttagtgccataaaaccagggccccagtggcatatccaccaatggagtaccatgcagcaggtagaaagagtaaggcagttttctatgggctgatctgggggagttctcaagatttattgtaaatggaggaaaaaaaatgcatagaacagttgttactccaaattgttgagggcaaggcatgggggctgatatgtgtattgaaatctgtaagcacacagaagagactgggaacagtaggtgccttggaggcagaggacattaggatggagggaaaccccctttgtcaatgtctaccctgctatactatttaaatatttgccatgtgcaggtgatatttttatgaaactttttcagaaaagcattttttaattataaaaggcaaagaaagaaaggggtaacggtggaagggagggaaaagaaagaaaagaggggaagggaaaaaaaaagatgttctaaggggcctcaagtttctcacaaaggagggaggagccctagggagtttgaaggagttcagctccatgttacaccagacgcactacccaccaaatcgtgccacattacacatcaccagtgctgttcacttaagcaggacatttttttttcctatttattagcaaagatgctgggagccaagaggtgaagtccaaggctttgctcaagatctgatcaaagagctagacctactcttagaactcaagccctctgctcccagctcctgaagccaatcctctctcctgtaccccatttccatttttctttctcctgctcaagtttataagacactcaccctctctttggctcttcctctcagcaaacttcagggtaaattgtgcctctccatctaggaagggcttcccttagtttcttcttggtaagctgatcaccgcgttcactgtgggttgaagttactttaaaacaagtcagcacgttaccttctccaacttcaagccctttcacaattattacggagtttactgcaagatctctctcatataaagtcaccttttcaactggttcatgcataaacatgttattttcccaagtaaatgacaaatttggttggagagaagggaattgttttaactcccagaggggctcccacaacactggacacattgaagaatctccatgagaactgtttttaataaaagctgccatttattgagcctctactaggcacattatatgcattatcttctgtcctttttctaccatatgggaaatatgcaatataaactggtattattatttttggataactatatatgttatcaaaaaatatagttttcctcagccaggtttcaggctgagttctcatatttaataattttttttttttttgagatgcagtctcgctttgtcatccaggctgaagtgcagtggcgtgatctcggctcactgcaacctccgccacctgggttcaagcaattctcctgcctcagcctcctgagtagctgggactacaggtgcccaccaccacgcctggctaatttttgtatttttagtagagacagggtttcaccatgttggtcagatggtctcgatctcttgaccttgtgatctgcccacctcgacctcacgaagtgaataaattttaatattgtttttcaacaaaggaagcatggaaacagaggctgagagagattaagtagcttctccacatttatacagacttgccaggtgtaggcacttatatgcttgccaagtggcaaggccagcatatctgagtccaaaggccctgctcttcccgctgtgttgggctgatttgaaacaaaaaaggttcaagcagtgaggaagccaggtaagcctctgtggttctctccctacctattctccccactgccaggaacctgcatgaaatgaaatcaagaccttaatgtgaaatgttgaaatacaaacatctccaggggctttgttcttgttctacttgtccctgctgagcaagttatagtgaagctgacttcaggtctatgtaaaaactgttcgttaattatagctgtcagaatagaaggtgtgctcagtgtcagcctaccctatatttcctatgagccaggcacttgagtatacagtcacaagcaggacaaagttcccgcccctgggagccaacggagtaactgactttggggaaaacagacaatacacatataaatacatcagtacctccagaaagtggtaagtgctgtgaataaaacagaccctgtaacagcatggaggtggcagaggcagtaggaggagggagttggctgcctagataaggtggtcagagatggccttgacactgaaggcgtgacccgaatgagaagccagccatgcaaagacctgagggaagagctttaggtagacggaacagcaaggaggaacagcaaggaggcggagatgagtttgatgtgtctgagggacaaagtgcgggacagggtgggaggcggtcagtggctggctgaagcagagtgtacaagaaggggagtaagtcgagtctggagaggtgggcaggggccacagtgagaggctgtgtgttcctgtcaatgtgtgcaaatagaacttaaaagacttactcgttttggagaattttggactaggttaacccataaggtctccgccaggtgagatgcagggatgctgctatgctaagtcaagcaccctcccatactctccatcaaatagccaccctgccttggctgccctagccttctgcacagcagctgatttttaaaaaacaaacagctgtcatggggtaacctgaaagatggctccagaactcattctgtccacttcaagacgtgctaccaaactagagtttttccagaggagtcagcaagagggaaagcactgagtattcaaacaatatccaggaaagatgatgtggagggtttcccatctgcacacaatcctctttccaaatagctacagctagccagacgcagtggctcacacttgtaataccagcactttgggaggcctaggcgggcagatcaattgaggccaggagttcaagaccagcctggccaacatggcaaaaccttgtctatactaaaaatacaaaaaaaaaaaaaaaattagctgtggtggcgcatgtctgtaatcccagctactctggaggctaaggtgggagaattgcttgaacccacgaagtggaggctgcagtgagccgagatcgtgccactgtactctgcactccagcttgggtgacagaatgagactcaaaagaaaagacaaaacaaagaccaaatagctgcagctgttgtgaattgaacattcccctatttcctttccctctgcaataatgtgtaaaggacttggagtttgaaaaagaaaaacagaaaaacccggccagtttaatcctagttttcaacccatttgtgtcacagaccccaagaaggaagccattggcttcatgagtatcaacaacagttctcaacaagttgtcctaaatatgaccacgctcatctggaatcactttaaaaagtatctaacttaacaaatgactaactagagccaccgtgggcaatggtgctcacccacaccacactagaggaataggacttcaagtccaagtgccctggtgccaccaacagcaacttagaattaagctgctctttaaggacaagccaaagcaagcagatgggccacaccacatcctgaaggcatgtctcattatcatgccttggcttcttggacgtgtagggtcaccattactcaggccaggacttcccagaggccagtcatgaagctctcctctggtgacactgtatgattcacagttaaagcaaaagacaactccatgccttcccatttcctacctcattcgtcacccaaatactagcagtttcttccaactgagacctccagctacaacttcagcccatttccctaatctttagcagagaagataaaaccaccatgcttcatttctcccctctggatcctaagttcatttgaaaaatggctttcattaagtatttggtaatgaagattatcttttttacatattgctgcatttggtttaggatttttgcatctatgtttatgggtgaggtttacatgtatttttttcactatccttatcagggttatgctagcctcataaaatcattctttaggccataaagtcgttttttacgtcttgcctattgagctaatcgagttgctcctgagaagacttccaatttcctggctactagagttctagcagccaaggatggcaagaagattcagaatgtaaatgctcacttaggggattcacctgacacctagactacacacttcttctctctccagaaaagaaatctctaatgcactgatgaatggaggaagggcatcaccaagccggtcggtataggaaggggacccaacagacattcaactctttggtaaccctcccttcacgcccaattccagaatgctttctgttgctaccatatctatgcttttcaggggattatgcactgtaaattgatttgcttatcactggctttctccaccactggctcagtgagattcaactttttcagctctgctaaatcttccaaggtctccatctgctttctgggttcaaatatttcattggctcctctcctggtcttcccgagcttgtggatttgtcttctaaacaaatccctttactgttgcttttgagaaagttgagagtatcttctatttttctaatatttgcagcatctataatatccttttaattccctgtgtacttaaaaaaattaatatttgtcaatttttctttaaaagaaccaacttctggcttcgttgatgctatgcttaatttctgtgcatatctacttcctttaggtttattttgctgttctaatttcttgaaacagatgtttagctcaattttcagcctttattacatcctagtataactttgatatttagatttagaatttacattctattattcagaactaattaaaattctataatcttaatacattaatgtaataatttaatgctgtaaaacctttaaattactgttgcagctgcatccctcgttttgacatatttttattattgttcaggttaaatttccttcatgatttcttcttggacccatgagttaatttctaaacatacagaggtcgtcttgtaatcttttaattttggtttctaacttaattgcactgtggttggagtgtggtctacgtggtaacaaccctttcaaatttgttgagattgactctaccgtccagtatatggtcgctttttgaaaaagttccataggtgatcaaaatgaatgtgcagttgttagatgcaattttttttttaacaggtttatgctcggtcattggtttccacacatctgtgctttcaggatgaagatgtggtcttctaaacacgtccattttaccaaacttgctaaatgtttaaatctcttatatactttcctgaattttttgttgcttggtctacatgaagcatattaaaatctcccactatgatgctggatttcttatttttccatatagctgtttttgttttacatattttgaggcaatgttattaggtgcataacttagaatctttgtttttctgaagaattgggtaagcatatcattatgtagtggttcgatctgtagtaatgctttttgtcttaaagcctatttccagggctgtggtgttccacagctccagggaggacattcacattacagtttatgcaaataaactgaaattagacagtctgtttcgttactttggagtggccttaattctgtgggttatgagtataacttctcagttttattttggttagtatctgcctgatgtatcttttccatcctttcttatattgtaggttgcctatgtctctctcttgtcatcacatatggctggatttcttttaaaaatacagtttggcattttttttttcgggaacatttagtccatttacatataattattggcacatttagatttctctctactatcttgttttggatgctctatttgtcctgccttttctttaccctatcttgtcttcttgactgattgcatttttccattctatttattcttgattgaaaactgtatcctctgcttatttttagtagatactatagaagtttttggcacaggtttacataccaaagtctgaagttaaacaatgtatttatcttcttcctgaaagacacaaggatcttagagtatgttcattccaattacctcccctccctagttatctgctaccttcatggattttcgttttaccttttttccaaccctgttaagactcttctacagttgctttttgtgtagctgaccaacataacaatcatgttctttattctacattccttgatacatttcaacccttccatactgatcacttcccttctgttggggcaaattcagttttttttgtgaaaatgttttctattttacccttgttcttgaaagggtggcccaatctcagtaagataacttactgacctattctaaggctgggcccaacagagcctcactccccacccttgtagggaccctggatctgggtagaacatttatgcggtaggggaacagtccttcttaaacaggcgcttggaagccctttgcagatgccggtgagaatcggcggtctgggaaagagtacacatcttgcagagaagctgaagagggaagcccttttcctgttttttcactttcaagaacatgagccacctggctgctttcttttgtagataaacaaacacttctcagacagatcacataaatcagcttattctcatttagcaaagtttttattcaaaagcttctcagcaccatctagttatcagaaagaatggatatcaccttttcctgcccacccaatccccagttccacaggcagaagttaaaccatttggctagagttccccctaatgattatgactgagaccatgataagattttggttgttctcacccaactgtctctaagcctctactcaaacctgactcaagcagagatgtgcacaccccacagttcagaacaggaaggaatcatgtcagatctgatcaacctcccattcttgggctattagaggcacaagaaattaccttgaaaaaatggaattcagtgactgccatctaggaaagacagtgatactgtccagcagcatgcagttccgagagctcaactcttaggccaccctccctccactctactctaggaacaaggagcattaggtctgttttctctccatacacctcaatcgctcgtcctctcgtcttattaaaacacagacacagaaccaaactttttgacagttaaagacaaacaattacatctaattaaaatgctaagagatcctgagctgttagagatgaggagagtagatagtatgacctgatcttcccccctcttttttttcctttaacagtattctgtttcagcataaagcacactttctgaagaggttcctggtggagactggaaatctgactgtgtcctgtggcaacacacagtcccttgcataactttggcttcagtccctggatctgtcctttgcagctacgtcaggttccatggaaggaggaaagagctggagggcagtatcactcagccaaagctcccatggggtcccatgctggcaggataatgggttcctgctctaacacagctagcacctcttcagggacatgcttcctgtccaccaccacttcgtagacatactcagagaaccactcatctgtcatgcacaggtaacctggagaaaagaacagaagacttatgagtccagagggcaagggacaaagagcagaaaccctttttgtaggataaaccttttacaaaactaatattcatacatatttttcagctttcccatctgtaatttcatttaatctaaatcttattagcaattctgtgaagcagataggacaggcatggctctatttttagaaaaattagaaaaccgggtcttgagtaactaggtgatgtgcccaggtcacatggtgaggttcagagctgggccttggacctaaggctaacaccagatcctgtactgatgctctcttcctccgctgccttggtgatggtgagtgatgacctgtatactagtagggaggcagaaaaacttctcattcatacagccacacctagggcataaatctctagggtcagaagggcaagcatcccagttcctttcttaccctaccagtgtcaatggctgttctcccccattcctttctatcacacactcctacaacaaccaggcgggctgctgtgagcattctgatggggccaagtcatcattcctaggtatgcacttatttgcagatgatagtgtgggagtcaaatgataaaacagtccttgttttcctaggaggaaatctacgatgacgatcaggcggaactagaagactcagacatctgcttaacctgctctccttaggaaggcctctccagtgggttaggactatacagaggtgccccggcactaatgccccatttaaggttgaaagctcagctgagagaaaaagtgtggtgtcatcgggtacccatcctagtaatagttgccttccataaggaggattaacctgcatctcaggctccactaggccaacacaaattccccttcagaaaccagatcctcatctctcaccttacacaaaaatcaactcaagatggtcaaaggctgaaagctaaaacctgaaaccaatacaagttctagaagataacatcggaaaaactcttccagacattggcttaggcaaagaattcatgactaagaccccaaaagcaaatgcaacaaaaacataaataaatgggacctaattaaactaaaaggcttctgcacagcaagagaaatagcagtgtaaacagacaacccacagagtgggagaaaatcttcgcaaactatgattccgacaaaggactaacacccagagtctacaaggaactcaaacaatcggcaagaaacaaacaaacaaacaaaaaaccaaataatcccatcaaaaaatgggcaaaggacatgaatagacaatctgaaaaagaagatacacagccaacaaacatgaaaaaatgctcaacatcactaattatcagagaaatgcaaattaaaaccacaatgtgataccaccttactcctgcaagaatggccataattaaaaagcaaaaaaattacagatgttggtgtggatgtggtgaaaagggaacacttttacaatgctggtgggaatataaactagtacaaccactaaggaaaacggtatggagattccttaaagaactaacgatctaccattcgatccagcaatccctctactgggtatctacccaaaggaaaagaggtcactaaatgaaaaagacacatgcacacgcatgcttatagcagcacaattcacaactacaaaaacatggaaccaacctaagtgcccatcaaccaacgagtggataaagaaaatgtgatatttatacatcatggaatattatactcggccataaaaaggaaaaaaataatgtattttgtagcaacttcgatggagctggaggccatgattctaaatgaagtaactcaggaatggaaaaccaaatatcatatgttctcacttatataagttggagctaaactatgaggatgcaaaggcataagaatgatataatggactttgggcactcaggatggaagagtgggaggggtggagggataaaacaaagacaacataccagtgtacactgcttaggtgctgggtgcaccaaagtcccagaaatcaccactaaagaacttatccatgtaaccaaaacccacctgttccccaaaaactactgaaagttaaaaaaacaaaaacaaacaaatctgttctttcaggaacagatctccaaaaaacttaaatgggaaaaaaatgctttacccgagccattgctaataagaagagcaaaattaaagtgagagactgaagtccgtatatttaaaacaagaatgggctgctgggccacagacagaacacagagcaaacgatgtgtactgaatcaagagaaaggcaggcacacacatccaagggctcccggactagcaatggccatcagcaccacgactgtcatctgaccgtatctgctacttgttttatagtaaacactggagccatttttctctgaaagtttgtataaacctaggcctgtgctataccatttcccactacacaggaccaagagaacggagaagtaggtgtttctagcaagagggtcccctagtgagcagttctcataaacctaggcctgtgctataccatttcccactacacaggaccaagagaacggagaagtaggtgtttctagcaagagggtcccctagtgagcagttctcaagcctcttggcctcaagccctgccctttacattcttaaaattattagggaccgaaaacattctttatgtggactaatatctatcattatttactatatcagaaactaaaacagaaagttaaaaatattaattcatttaaaaataagtatgaaaaatgaatataaacaatatattttgaggaaaaaaattatattatgtaaaaaaatatttttagttaaaaaagtggcattgttttacattttaatgtctagatttgcagaagacagctgaattcctgtatctgcatctgtgtttaatctgttgcagtatgttgttctgcttgaagcagatgaaggaaatccagcctcacacagatatgttgctcaagggcagaccctgcacactccctgaaagggccctagggaaccaaagatcacactttgagaactgctgctcttgaggcaagactggattaaatttaaaggcaacaatactggtaagtctaattttgtatgctaaaaggtgtgacaaagggcattatttaacctgaaaacacaattgatttggtgaagtcatctatgcccaatcctgtttttcacccgacagaagtcaaagacagatcatcctgacgtggcatagcatacgtttaccctcaaaaacactgtggaggccaggtgcagtggctcacacctataatttcagcactttaggaggccgaggcaggtggattgcttgagcccagttgttcaagaccagcctgggcaacatggcgaaaccccatcctcacaaaaaaaaaaaaaaaaaaaaaaaaaattagctggtgtggtggcctgagcctgtggtttcagtgagccaagatcacaccactgcactctagcctaaacagagtgagaccctgtcttgggggtgggaatggtaggggttgggagtgctctgtaaaagtgttcaagtgctccgaccaaggcaggtaaaggaatgcactcttgtctcctgataagctggcctcctggatccagggcccctactttcaatagacgagagacggaaggacagtacaggcccactctgtagctacttctggcttgtcttgattatatattccaaacttcctggctttgttggtgtcaggacctggcccttaattaacatcacccacaccagtgccaccaggttctagcaacaaaagttctgtccgctcaaaggtcaaccagtgcgtattatttaaaactaaaatactgcatcctaagtgagtgcttcctgaaaaactaagcatctgccttcccaaaaaggagctttcagcaagcaggagagcagactagggaacaccacactgtttgagacattagtcgtcccttccctcaccacaatgcaggctgaataaatcactgcagtggccctgggcagttaggcaggtgaaggatagaagcagattcatgtaataaaattctgtgtcctttcaacaatactatcaccatacaatcaaatgaatcttcaaagaatgctcccagaagatggacaataagtacatctacactatcttgttccaaaagcatatcagattaagtcctcacaaattaaaattcctatcaattgtaacccaccctttcaatgtccctgccaagaggacccgccttgattagtctctctcttcaggatatgagttctttggggacccacaaaaacctcacagtctaggtagctgccaagtaattgcgccctatgtagataatgaacttgtggctgccgtaactgttgacactgtgtgtcttggagtttgactgagaagattaggatcagtgtgtctgaaacctgtgtaggaagcagcaaagcaccggctcaggcaggattcggctggcccttttgacttgcgggaaggtgcagctcctaacccttagacacactggccgtgagacacaagcattccaaggaaaaaagaaaagaaaacaaaataaaaacctgctccagggatcccaaggttacactgagtgaaacacagacaaatagataaagtcagctttaggaactaaggtgaaattaaattttgtttaaactttaatgtcttgtttacatgcgatgagaaagaaagaaaagtgaacagtcctcaaaacaaaacacctcaaaccaaccaaccaaccaaaaaacactggcaacgtttctgtattttgtaacagaaagggtagggtcagtctgtaaagggaaaaacagtgtctgtgaatatagctgtagacaggttaggtgaaattcattcagaaacagaagagtttcaaatgggctagtttaagggaaaaaagacgctttacctaagaaaacttttttttctgaaatcccaccagaaatgtaagatttaagcctttcagactaaagaatacaaagaatataaaatatattttaacatattagaaacattttatattctttgttgtctttgttctatgaggaatttcacctcactaacaaactgtatgtggctattattttttgccatttttaaaaaagttatgacaaaatgaaggtatctgttctgctctgacggtctgtctggcagcatggaactaagaagctggactaccaaggcctcattcagtcactgccaatctttcacctggcagctataactcaaggttgaagaaaggctcccagaaaggaaagcagaagcctcactggcacttgtcttatatttcaagcttcctaatcatcagggagaaaccatttcacagaacaggaatcactttataatgaagttgcaaagactgtgtagcaacatgaagaaatgtttaggtgataaaaaatagattagagtggcatatccagtataattacaactatgttacaaatatagatgcacatgaaaaaaaaccatgaaaaacaataaaaaatgaaaattttatgccatgggatagattttctctccaaaatttctgaaatgttacactgctttttaactccttaaaagttacccaaactcatcataaaaagtcttggaaacatgaaaggaggagaaagagaagacaaatattaatttttgagttgcctacaatcccaccaccttgggacacatgttcaagctctgtcaaattttacatgcatccttgataaagtttctgcatgtactagaccctttaatttcataaaaatgagacatcatacatggtggtcttgtattacaaagtaatacacatactgttttccaattaatctctttccttactgataatgaaatacatctatctacatcataatttttaagtaccgaatctacatgattaaatcaaaacacgtttaatcagtcccctattgttggaatccggattttttcatgcttagaaacaatactgttataaacatttctgtaagtaaatcttcgtgcacagccttaatcatctgcattaatgcactgtgtaatgacattctggtcaacaatgaaccacatatatgatagtggttctgtaaggttataatgtatttttgctgtaccttttctatgtttagatacacaaataacactgtgtaacaactgcctagagtattcagtacagtaacatgctgtacaggtttgtagcttaggggcgatgggctataccatcaaggtttgtgtaagtacactccatgatgtccacacaatcacaaaatcacctaatgacgcatttcagaaaagatccctgtcttaagcaatgcttattaattttattaataaataaatgtattaaatttccttatatcctaatcaatatctggtatacataattactaactttcttcttggatccaatttgagccttttctccttttatgtgtttgcttgctattgacagttttcttttgtaaagtgtctgtctgagaactctgttcattttttaagagacaaggtctcgccaggcacggtggctcatgcctgtaatcccagcactttgggaggccgaggcgggcagatcacaaggtcaggagttcgagaccagcctggccagcatggtaaaacccatctctactaaaaatacataaaattagctgggcatggtggcgtgtgcctgtagtcccagtcactcgggaggctgagacaggagaattgcttgaaccaggcaggcagaggttgcagtgagccaagattgcgccactggactccagcctgggcgacagagtgagactccgtctcaaaaaaaagagagagagacaagctctcactctgttacccaggctgagtgacacaatcacagctcactgcagcctcaaactcctggggacatgcgatcctcccaccttagcctcccaagtagctaggactacagacgtgcgcctcctcacccacttaattttcttaatttttgttgagatggggtcttacgatgttgcccaggctggtcttgagctcctgggctcaagcaatcctcctgttttggcctcccaaacctctggggttacaggggtaagccactacacctagccctctgcgcattttaaattggagcttttttctttttcatagtcatcagttacagtacactctatattttatattggttgcaaactttttttcctattatgtaactggccttctaatttagtttatattttctagcctactaacaatttttattgctgtttggaggcagagtcttgctctgtagctcaggctggagtgcagtggcgtgatctcagttcactgcaacctctgcctcccgggttcaggtgattctcttgcctcagcttcctgagtagctgggaatacaggtgcccaccaccatgcccagctaatttttcgtatttttagtggagacggggtttcgccactttggccaggctggtctcgaactcctgacctcaggtgatctacccacctcggcctcccaaagtgctgggattacaggcgtaagccatcgtgcccggcccattttttgtttttattaagtcaaatttatcaatctttttcttttggtttttaactggtgttatgcttataaacatttttctgctattataatgaaaaaaaaaaacaaaaaaaaaagaaggataagtgagaagaaaacatcagaaacaagactctcaatgaaaaactccattactcactaaggccttggcatagtccccaactatgaaacagataatttcaacagataattgagtagtgacaatttgtcaaccgcttctgttaggtatccactgggtgaagcatgacctaatacctccttgaatttgtacagggtatgttgcaaatgtgcaaaatgacacaatgcctatggaatggtgtccagagatgttggatctgtccttttcagtatctagaaaaattacaaatgcacttaccctcttcattaagcagtgtcatttctgggacttcatcctatagatacacagtacttacatgcatacaatatgaatttatgtgcaacaaagctaatatttattcggcacttaccgtgtgccaggcactattctaagcactgtacatatatatagtaacccactgcaatactgtttgtaatagcaaagactgaaacaacccaagtcccattagtaaaggaaatggttaaataaactgtggtagatccagacaatggaagataatgaagctgtactgatgtactgataaggaaatgtccccaagatacgctgtaagtgaagtgaggacaagatgcagagcagacgacctagtgtgctaccactagtataagaaaagaagacaataatatatatgtgtatgtttgtactaaaaaaaataaggaaaggcataccagaaatagaaataataacctaagagagaggcaggggaatgaagagtgacagagatggaaacaaaattctttttcatatacctttttatattttgattttggaacaatgtaatttcattatctattaaaagaattacactttagaaaacaaaacaaaaaaatacacacatatatactccaaaaccctgtgaggagcttacacttcacaatgcaatttcacatcactatccttgttttgattcttattctcacaacaatgctgtgaggaaagagggcagtaagtaaagccaacatcgaacccaggtcttaaattcaaattccatctttctcatagggctcagcttcttccagttgagcactctgtgggcaaagagacttgggaggtagttatggcttcagcaacagatagcatttagtctagctcaggtacctaactttgaaacaaactccatctgctcacaaaccccatatcaacaaacaggaaccctatttttgttgggtccatttataatgtattttgtatcttttatttatttattttttagagatggagtctcactatgttgcccaggctggacttgaactcctgggcccaaacgatcctcctgcctcagccccctgggtagctaagactataggtgcatactaccatgtttggcgagctattttgtctgtttaaatcaaagagacaccatgtgttctaagtgcatgtatttagaaagatagataacaggatgggttggatgtttaaaaaaaaaaaagccagaggaagagaaccaaaaccaccccttataattatgactgccatttgaaacagtgatctgagaagaggcttctttttcctccagagaaaacatagaagtctggctatgtggtgaggacacatttacattaataaaccatttgctgataaaagaagagatactcttatagccggatattacttgcggcctctttcagaaacaaaggttagaaggtaccgtttccctagtaaatatactaggaaaaatgcagggtggaaaatgtggtagagaaaaggggttgttttggcttgtggtttgtattttttaaaccattaaaccaccacaaagttcagtcagcagaagtgtccacagcctgagaagtgcccctctactaaggagcccagaagaagcctgttcacctcccggctgacttctttctctagaccaatgagcatgagctaggcagccctgagggcacacacagctctccaggatctctgagggtgaacccggagaggaaagcacaaatttagatgccatccaagggtcttgttttcccactgaaactcaatgacttttctctcaccccaaactatcgctactcctatttgtttcagacaaagtctgcttgtcggtcactcctcaaaagctctgtgaatggcaagccacattatttcttggcttcactcctctgacctgttcaacgcatgctccaaatgccaagagctgcacttctcagccaccatttctctggctggcctccctctcccttttcagaaaaaaagccacagccctaacatcctccctaaagagggtcacccttgaagaatccctaaggaggcctcacagttccagtcactgaccatctcccttgcagtttatcccgtgtgtgactctgcgcttattcttgtgtttatgttttacatatttattcttacaataggttacaaacaccatatggggccaagatttacagccttaattgtcccagcttcaattccttgcaaccccactatacatagcctttgaaagaacgaagtactgacatgctgctgatggagcataataggacagctgggcttgcaccctgacccctcctgaagtttccaaaaactaccttaagtccaacccaacagcctttctccttgacccattttctgtctgctctgctgttccactatttaccaccatgttcttcctgacgccctctagtcctgggcttcctaggcgctctctccaacccctcacccttttcaatcacctcagcttccatgtcttcctattgtctccccactgaggggaggtactccctagttcttcttctgttaactgccctcttggaaaaaaaatcatcccttctctgcttttctcggtctatttatcctatatcttacagtctgaggagcacaccatgaatgccacttctgtcacatcacagccctcttcaaatccccttcctgtgtcacaggtgaataagtataaattcctctgagggtcagagacattcattccaccatggcctatgcacggttccttgcatcccatcaataaataaatgtgagttgatgctactgctaatggttttttctcagcactaagtttattcacctccactgctttctctcacgacactaagcccacactatgggtcatctgcccactacactggtgatgtagcataatgatcacattagggcactgaatttttagagatctgaaactggaaccatggggcaagttagatgccctcctctagaagggaaaggttagggagcttcatgttcttgttctcttgccgtcagtctatagataacattaacaacagtagcaatgggagctaatatttctaagcacttcttatgcgcctcacatggttctcacaacaaccctacgagataggtccaattattatccctattttacagatgagaaagctgaggctcagacaggttaaatgccaatgaccactgttacacagccaatagatgggttagccaggatgcatacccaggcagtctggctccagattctgtgcttaacctccatccttcttaaaccagtgcaaacaccttggagacaatctggtgaaaattacagatcttatctacaggtaaaaacacatctatacacaaaactctacattcaatatgaggagatttctccctgaagcagatgcctcattgcaggttaggagctctgtcacatagtctgtccttgcccaaataatgatagccctctcttagtcacacactttgatcaggaagcaccagtgaactggagagtatgtgcttcctctattccatctacatacactatttctcagccaaagtcatgcaggctttttggttaataaagatggatggtgaaaagcccttctgagagggccgggcgtgatggctcacacctgtaatcccagcactttgggaggatgaggtgggcagatcacttgaggtctggagttcgagaccagcctggccaacaggtgaaacaccgtctctattaaaaatacaaaaaaaaattagctgggcatggtggcaggcacctgtgatcccagctactcaggaggctgagacacgagaatcgcttgaacctgggaggcagaggttgcagtgagccaagaccgcaccactgcactccagcctgggtagacagagcaagactccataacaacaacaacaacaacaacggcaacaaaaagcccttatcaaagaacccagaatccagattaatggtagcagcacttttcccaagcctggagagacatgaaaccctctgaggtgacaaaacaaatttgcaacttgcccctttctcggaaatcagaaacctgtgcttttaagttctacaattcactcttgtttcagcaagtctggcccaacattgcctagtttccattattgtactagagatccagaactgaacctcaaacagacctgcaaataactgattgtcttttgtaagtaatacatagggaattttagggaagctgtctgtgtcaaattaagagatttgaattccaattctatctctgattctgtgcaacccaaacaagacacaactgtcagtaagttttagtttcttcacataaaacctgggtataatcacccatgttcacatcctgagttactctactctgatgtcatgaggagaaataaatacaaatacattagtgaactttgaattctcacgaagcaagatgccctgtagctttatgtcctgagtacctccaacagaaatatgggctgttcataactccttagatttatataacaatatacagtttgaaaaatgcctgcatacattatttcatttgatggctacatacaaactgtaggagctcataaagaaacaaattgtccatgttattgacatagaaatgtgacactacaatgagttaaattactgcccagcatctaaaatcaagaattaattattagtaactgtctctccacaactcacctggttctacaacatagcattttatgaagaatatgttgatttttgtgcctagctttgaatataccatctccaaaatcacttgtggcagttgggctggtgagacaattaaaggtcataatgttggtttttaggaagcagcagaaatctacatatagtctgaattgataacatgtttctttctaatctctaacatgccaaagtatctttaactgaaaccatttagaggctcctttctagaaggaagtctgaaaattttactaaaatgaaagaaatcaggaacagagaggctcacttgtaagaaaagattaaaaatgtgggttaaaaacaatttcaaatgttcatgtatctgaaaggaacaaaagcaatgtgaaaaatggaaaactcatcttggttcaaaatgaaaaccaggagagacaaaatttttaaaaggtaagtattttccttcagtgaacattgcagaattagaaaatatcctccatatcttcacttaaaagttgttacttatcatattgagaaactggaccaaataagcattaagaactatattatgataattccacatttagagttctgctgtgtcaggctctagaaatggaatacaatctcataactaagtgaaccaatcacaaagaagtaaagtttcatagtaagactggttcattagaaagaccatctaggaatttaatttattgactatcaaatacactattatttgcatgacagaatattgataactactgaaggtgggtgacaggcatatgcagggttctttaatacaatcctgtttactttatatatgtttaaaattgtccaagataaaaagttaagaactaaataaccttggccgggcacggtggctcacgcctgtaacccagcactttgggaggccgaggtgggaggatcacaaggtcaggagatcgagaccatcctggctaacacagtgaaactctgtctctactaaaaaatacaaaaaattagccaggcgtggtggggagcacctgtagtcccagctacttgggaggctgaggcaggagaatggcgtgaacctgggaggcgaagcttgcagtgagctgagatcgcgccaccgcactccagcctgggcaacagagcaagactccgtctcaaaaaagcaaaaacaaaacaaaacaaaaaaacaactaaataaccttattataaagcagcatggacaaaattcagggaaattttgggtggctgcatagtttctgacttgcctaagtcacaatgtgctaacatgtgacaaaccctcacagaatgccccaatctccactctttactcagattcccagccacaaatgatgctctaggggccttttctcccaatgtcagacatttacataacatctccaggtccttcatacagttttatatcccttcatccactctttctggtcaccaatgaccatgaactgacctgttatttcttgagtggacgacatgctactagaacagggaaggtgagagaaagcacagtttagtggttaagaaaactggctctggtgtcaggccatctgggttataattctggctctatcatttactagctaggggatctgcaggtcactttggcttagagattaggctcttctcagatgaatttctgactaataacgagaggaatcaaaggtgacttccttgattttaaattcttaaatattttataaaatatttttatcaacttttcaaaatgaaagataatatatcaaatcccgaagtctgttccctcacctaattgtgaaattcatttctgatatgatccattaacaaggtacaaaatggatagtcaagtattttaagaagcaggggagaaaagaaacccaggttggtattacatgttagatatgcatccaattttcagtacaactgactatgaatactagaattcatcaacttgaagtaatccaactggtacagtaaagcaaaaactgatttctccttttatgtcctcctgctcagaagaaaccttctgtccatttttggaatagtcaggttatgtgttacaaaagagtttctgggcaggagagccatgaacatgaccaatggggagaaccaaagccagggctgggcaaaggggaaaggcagcttgcccaggtatctttgctctgtttatctccagcatgtattatcaacactgctttttcagaaacatcaatcttaacagtcagaaatcccaaagagaatagcaacaaactgttaacaatgttatctacagaaacaaaatcccagcaatgcttcttaaggttgtcatatctcccaagagagcataaacagaggtcctacctcagacctgccagccaatgtccactaggatgacagacaagaaggccctgctgggataaacacatattgccaacataataacatactatgcgctctcctgaggtcaggccaagtgtgccaattaaattagatcatgttttctttccttccttcctgttaagttagaaagaacattaccaagaaacacatgagaataatttattttggcttgaatgaacgactccctacccccacttcagttctatttcttatcttttggctctctactgaaatgctttgctgtgtatagtcacaggcatttcagttatttgagaacaacaaaaaagttaatctttactagatagctgcagatttcactaagaaggattacaggagagttacagggatagcaagatcccatattttacagttctctaagcataataatgaaatgagtaagttagcaaaagcaaaacttttattgagtaaaagtaaagaggtaaagctaaatggaaaaattatatacagtaaagtgacctaaaattatctttaagtatttaggttcaaaataataaagacattaactcacactacataaaacacattttcctgattttacaagtgtttatcctctcttaaccagataacactactatcttcaaactcactgactattacagatggaaaaatatcgcagcaagctgacggatccaggctcatctaaacaaatataactttagttcttttcctaggtgctaacctatatgataacaaatccaattataggaaccaaattagaccagaaatgaaacagaagctgcagggggttcattggaagcaacaggaaaactttaactcagtatcttatgtttgctagaaataatcaaatctttcaaattttaagacaagtatccatctcttaactatcaccaacttacagatataactaaactgtgagttatttttactctgctaactttgctgaggtttaaacccttctctacttgaccctaatgtgtatttgtcttaaaataaaattcaccttacaagaaaccaccaattttaaaaagtattctaattcgtagtagttaacttaataggcacccctaaaatcacagaacaattatagaaatcacagaaggtagacatgtaactatctgatgatgaagagaaatgcagtaacagcacttgtatttgtttacatataaacactgggctgctgagtatcacagcatattccagggacagtcagccaaaatccaccagtgattattctcatagagagatgaaaagccctcgaatgacaaataaatggtcttcagattttggctatcacatacaagcctgtgctgcccaatcagcatactaaaatgctgtcaagttcaaaactcagcttaacaggctcttctaaaacagcaatttttcaaataggagctatggaagtcccatatgctcatatccaaacctccacaccccctcctctaccttttacccttggaaatcctacggctgtgaggaacatagctggaaaatcacgattctaaacacagagaggggcaacaacaaagagttgctaaaatttctttttctttctttttttaaaaataaaatgcctggctaattcctgttgggtaaaatgtatgctcaagtttgtttccaaatatctctgaatgtcacttctctggcttccctacctggttcttctcagtcttctaactagtctactaaggtgcggttaatgtttttcctagccagaatccattggctaaaagaaaaagggactctgagaaagaactggctataaaatgcccccagcacacatgaatctacatgctcacaggtacacatatgccatggtgattgccacttttggtttggaaccctaaaaattaaagcgtaaaatctctttcaaaagctattactaaagacagtctttaaaaatgtggtctcaaaattttacaataatataccctaaactgttaatcaacagtgatctctaggtggttggattattagagactttttatctgtattttaaaatttttctacaactcatatattactgtgttattttgtttagtctacttagtgtaagttatgacttctccctaggttttgatttgccagtataaagaagtgctaagtggtaagcaaagtgttcatttccactttaggtatgacaacttctaaggagtctctaataaatgcctaaagaaagcttcttgccagtcccattctcccatacagaaggcttctgactttctagagtactgatgtagtagatgaaaatacatcaaggctgggcgcagtggctcacacctgtaatcctagcactttgggaggccgaggcgggcggatcacgaggtcaggaaatcgagaccatcctggctaacacggtgaaaccccgtctctactaaaaatacaaaatcagctgggagtggtggcgggtgcctgcagccccagctactccagaggctgaggcaggagaatggcgtgaacccgggaggtggagcttgcagtgagccaagattacgtcactgcactccagcctgggcgacagagcaagactctgtccaaaaaaaaaaaaaaagaaaaaaaaaagaaaaagaaaatgcatcaaatgccatatagcaagtgtcctggcaagggcactcaacctcctcactagccaagcggtctacaaagaggggagggtcaacacagtttgcaacaaatgcagcacatagcagtctcagagccaacctgggagttcaggcatgccataatggtcaggagaatcctgggggcaaatcagatcctcagatttttctgtagaataatctagtcagtggagccaattactgagaaatcctccacactagagcagcttgacacccagacaggcagagtagagcaggcccagtcacctggagttagtattaccaaactgagctcacctttgtggccatggtcttcaccccatgaattctccactctccattttgtgaaagcaccatcctgatcatcctgcaaaaaagtggatgatggtgagtagtctgaagccagattctccctgctgaggtgtcatataattttagctcttctgtagccacttgaaagaaacagcctgctctatacaggcagcctgctctatacaggcagcctgctctaaacagtacttggtcagggctatatatttcctacgatcactaaagggatactccagtagaaatggaatttgaatctcttggggtaaaaacataataaactaacaaagcaataaatactatttcatcctttctattctattgtatacataaaataggcatgtaaaaatgctacttgactaagaaaaactatattaacctactaaaagcagtaaacatttgaagctggggattcttgcttttaatcaatcaatattgattaaagcaaatgcatcctactttattttaggaataattctaaaacctggtcagagtcttttttaaacaaaacaaaacaaactcatcatactgcctgattttctacttggggaaaccaaataatgatactctcccaaatgcattcttttactgatccagttacacaaatattgaatttcaaagaagagactgaatggcaaagcaaaagtaaaaagaccattttcataaacaaaagccaggcacttctactgttctccttcttccatcttcattattaaaataagctcaattttggtcttcttaaagggacagtgatactcatcacaacaaccttcatttacagcctttactatagtgacacagagagggacaagaggaaggctccatttgggaaaagacttttttctttcatgtttacccaggacatttactgatgtcaaggcaacttaaatctttgtagcatgagaagagcactcacccctgtattatcgcctaatgatttcatctgtcaactcccacttgcaaataactatatgatgagtctcatctatatgggatttggttctctttggctctgctaacccaaacactccactcttggcagttttcttggatctcagtaattttctgtctcacaaatagcgccaacaaactcacaagtttcacacacccttacctgtactaatccttactctttgcccccaaatcctttaaaaccatatcgttatatactatacattctgcagctggcatattatatgtctgttttggttttctattcctcccactgtagtccaactttactttccttttaaatatcactgttagaatcgatgtcacctaaagtgatatagttacttgttactctaagtctgaaaatgtttcctatgttttccccttggccaatgaattcctggagtgacctagatcaaattgttctctgggtcatctacaattacaaaatgattaatacctggaactcccttatagggattccatgatatcagcaacaaaagaaagaaaattgtggaaatataaccactagtatgcatttacctctgtactattactcaagtgtagttcaaactcgtttttgggatcaaaaactctagtggaatgaagagaaaatgttcaatataaaattccaggtataataatataaattctgctttataccattagcatgtaaggtagctccattttcctaaggaaacaacccatgctaatcaaagaatggaagttcccaagaaaatgacagtggtattcattatttttattcctgaaaaataggagtattctataacagagatagaaatgataaaaagctgaatttttcttggaaattacaagtttttgtttgtttgtttttttaaaaacaaacaaacaaacaaaacaaattctcggctgggcacagtggctcatgcctgtaatcccagcactttgggaggccgaagcaggtggattgcttgaggtcaggagttcaagaccagcctggccaacatggcgaaaccctatctctactaaaaatacaaaaaaaaaaaaaaaaaaattagccaggccgatggtgcacgcctgcactcaggaggctgaggcaggagaatagcttgaacccaggaggtggaggttgcagtgagctgagattgtgccactgcactccagcctgggcgacagagcaagactcagtctcaaaaaaaacaaaaaaacaacaacaaaaaaacacaaaacagaactctatatagtttaaaaatttatttaaagaactttagtttagttataaagcacccttatttgaaaaaccttttcatgtattttatttatttatttattgtttttttttttttttgagacagagtcttgctctgtcacccaggctggagtgcagtggtgcaatcttgtctcactgcaacctccgcttcccgggttcaaaggattctcctgcctcagcctccagagtagctgctggaattacaggtgcacgccaccatgcccagctaatttttgtatttttagtggagacagggtctcgccatgtcggtcaggctagtcctgaactcctgacctcaggtgatcctcccgcctcagcctcccaaagtgctgggatttcaggtgtgagtcactgcacccggtctaaaattccttttataacctaactttatgttttgtttataattcaaatgtgagaattttgttaaattggggtgataacacttaaatcaccttttgctgttttaaaatgacttttcttgatctacataagtaatgcaaattatactccacacattctcctgggtaaccctaaaaacctgtttcttggtgtgggagtctcgctaactacagagctgagattactgacgaatggaataatgaggaaaacagctcgctggtttacaagacctcaacctttacatttatttatgaaaactacatgaggatcaggagtatcagcattaagactgcctcttaagttcagggcacctttacaccatactgtgtttgatctcatataaaactgagaatacctcagagttctactacttaaagcactagccttataatttgcaggaatgtaattaaacctttaagaccaagttttgaatacagagagagcacagggatcttagatgctgtggggttgaaagggcacccttcaagtgaagtagttggaagaggtgagaaaaaggtacagaaagaaaaccccatcccactcacaattctgcatagagtataaaaagcaaatcaggacttttagataggctagttaggaaaatgtggcataatgatatgctaagatatttctaaacattttaaagatcataaatctagtggataggatagcaaaaacaattctctatcaaaccattttctagctgggtgcggtggctcatgcctgtaatcccagcactttgggaagctgaggcgggcagatcacctgaggtcaggagttcgagaccagcctggccaacatggcaaaaccccacttctactaaaaatacaaaaaaatcagctgggtgtgttggcgggcacttgtaatcccagctactcgcaaggctgaggcaggagaatcttttgagccccagaggtggaggttgcagtgagctgagatcacactacagcactcctgcctggatgacagagtgagactccatctcaaaaaaaaaaaaaaaaaatgattttctagaacaatttatataaggtagttattctgtgactttccaggaattaggctagaaagaatatttttgcttgtggtggtaaagaattaaagtagttcaagttcttccttcctgatgatcctgagcacagaggtgaaaatatctatttttactgactggaagtgaggagtttatttgtgaaagataaaatttcagttgtttccaactctataacctataaaaagtggtattactatacacactatttcacaggaaattcaaaatactttacatccaatttcctgaagctctgcatataactagaaatgggtatggagtccacaaattactgttattgacattttactgcaaaagaatctgaatgacaaatgaagggaaatctgaacataggtcatcaagatatgaacactttcagggcacattttgattccttataaagtagaagttatcttctctcaagttcccttgctgacttctctttaaaccatgaccttccaaagttacagaaacagttacttggtcgctccctgctgacccaaattctcctcatagaaagttcctatttttatattacctctaagcacgcagccaagccccaagtgacgcaggtacgatgtcttacttggaaactaacttttaacagaaatcatatacactatgaatgaagctttgttgggtaaacagtctacaggagaatgtagatccatctgtgcaaacactccagcaggcatgctgagggtcataccttctctgagacagcagtgaaggtcatggcgtgggtcataagtgactcaccaaaagtcagcctctccgctttattcatgttcttcaaggagacaccaaacactaactcatggtcatagctgtaaaaagaatgatagtacaaaataaagggagtacgatcatggggaaaactggcttttggttgtaaaaggaattcagaagaaactgaaggggctcaacagctccaaataaataaggctctagctgtagctcttcagaaagaatatggaacatgcagaacttagtctctcagtgggagtccattctctatgtgtcacaagagtatgcaggaaaaaaaggagatgattaaacataaattctccacatcagaagctgacaagtttacattgtcatttaggcaagaaaactttaaaaaataatgaaaaaagcgtttgaagtaacttcttagaaaactgatctcttttgagctggtggaaccaaccagtttctgaattcatttaaatcactgctgattaaaatttaaataaataatgtccaaaatattggggaatatttttgcataagcactacactcacattgttaaatacaaagaaacaaaaggcaaaatacatgtgagagaggtccttgcatgttctagttagtgtgagagacacacttgggagttgcatgtacctgttttcaaaaattttttaaacctcattaattcttttttttagcagatttctctatcaagatatttactcaacttcctacaagtaacaactatttataagtaaccctaaaatagagaatggtgaacagtcaaggaatcctatatgatttagtttacaaattaaccttcattgtcataaatgaccaggaggaatgctataaagtatgcatgcaaattagtcccacttgtcacaatgacaaaatacaaagttaccaaagtaacatagcaaacgggggctctggaaaatctttcattacactcccaaatgcactgaacacatttccgcaatagtcaattatttttttaaagtgtctttctcatagaggatggctttttaggaacgcccaacgatttccactcagatagaaagtgggattttgatgtcctgggttagagtgtttaagtatgtggagtttctgctatgagtcctcaaactctaaaggatgcaaagaaagagacgcgcccttaggtcaaccttcatctttggatgaacctcggcagagtcattttgtaccaacagcacactccaacagcaacaacccacaaatgactttccattttaaatttcctgcactcacagattcatgtcactgaggcccagcttgctattgaagtgttttccaacatcacagccaaaccacacagcctagaaacagaagaaagaggaagaaagtcaacataaaccccatcttcctattataccaaagaagtaaaagatgttttaaccccaatgtgcaaaatacagaaacaataccaacctctccatctttgatggaggcagcaaccatctttttcaggaagtcaatgggctggttgttgtatagagtttttctccctccaaccatattgcttaagtattccactgtgtaaagtttgttgtacttgtgctggggcctagggtcattcactaaacaaatctatcaagatcaagaacacattaattagggcacaaaaccaggaatgtcaagcaacacacagctctcctctaggttcatgtttccatcaagctcatcatctctgcctacaagctaagtactacagccacattgttaagtaacaaagaaacacaaggtggcaaaatacatgtgagagaggtccttgcttattctaattcgcgtaagagacacaattaggaggtgcatctacctgtttttcctactagcaagaactgctccaaaagcaatttttttttttttttttttgagacagaatctcactctgtcgcccaggctggagtgcaatggcgccatctcggctcactgcaacctccgcctcccaggttcaagtgattctcctgcttcagcctcccaagtagctgggattacagatgtgcgccaccatgcctggctaatttttgtatttttagtagagacggagtttcaccatgttggccaggctggtctcgaactcccgaactcaggtgatccactcaccacagcctcccagtgtgctgggattacaggcatgagccaccgcacccggccctcaaaactcattctgaaaaataacatgcactgagtaagaaaaattggagagctaatcacaaggcccctgttctcaagttacaagacaggcatctgcttggaagaggatcaagaagccaataaaaggaagaggctctgatcctcctactaggcagatgaggaagacctaaagggaacaggaaaaactaagattactcccttcaacaggagagttccccgaggggacctcagtgcaaaagtgctctgaatccacgataagaaatacccaacacactttcattgttttgcacttgagaatgattctggtcctatacaggggcgcatgtgggaattaaaatgactgctggcttacagtttaaaaagtctctgaagaggaacattgtggaaaagctgataaatcctggcaccaccaacttcattagctgcataaaatacttcagaggaagtggggaaaaatgtttgtttgctgtctagtttgatactcatacatgctaaccaagaatcttatacaattccctgtggttaacagccatttgaaagtaaacagccagtgactaccagtgccattcaccaaccttatcttccatattgaagagtggcttgacatgttccctgtaaaactccaagggtgttatggggccaattttctgataatttttatctttgtctcgatattcccaggtgaatgtctctggtggattacccaaacagatgcacaccactcggaatatctggaagagaggaggaggaaaggcgagcaatggttagggggaaatgttatttttttcacctcttcattttccttaagcttaggaaacacaagaagttagtggctaaattcaagctaaaaatttcacaagaaatctaatactgcgtcaaaaactggaaagccgatgtctgagatttgttatcagtcaacttatgagttctcaaataaacactgtgaacaatgcgattctgaaatgttaacatttagtgcttagtacttgtcctgaaaatttaaacttccttagccaagaatctgtctaccattgatacccagcaagatctgagttgctgctctgattatttttcaagtaaccaaaaaatgacaaattttataaatggatttccttccctttatacattgatgttttccttattacaacaggggtctctagtcataggaaagtaactaatttttcagctggagttggatgacaatgcctgttaaaagtattactagaagaggagggccaggtgcagtggttcatgcctgtaatcccagtactttgggaagctgaggttggaggatcccttgaacccaggagttcaagaccagcctggataacatagtgaaacctcatcttaaaaaagaaaaaaattagctggacgtggtggctcatgcctgtagtcccaggtgctcaagaggctgaggagggaggatcgcttgagcccaggaggcagaagcttcagtgagccatgatcgtgccactacactccagcctgggtgacagagcaagaccctatctcaaaaaatacaaaaattaggggcacatgttctcaggatctcctgagggctgagtcatggtttaaaaaaaaaaaaaaaaaaagtacaaaaactagccaggcgtggtggcctgtgcctgtggtcacagctactcaggaggctgaggtggggtgaccacttgagcccaggaggcagaggttgcagtgagttgagatcacaccactgcactccagcctgagtgacagagtgaggaccctgtctcaaaaataaaaagaagaggagtgacttttagtaataaggtataattttttgggttgtgagacaacatattttctaatgatgtcacaacaccttcaagttaacatcattacgatccaaggatatactttatattattttcattttatagaaatgcaaaaacaaggctgggcacagtggctcacgcctgtaatcccagcactttgggaggctgaggcaggtggatcatgaggtcaggagtttgagaccagcctggccaacatggtgaaaccctgtctttactaaagatacaaaagaaaacaaaacaaaacaaaacaaaaaaactagctgggcatggtggtatgtacctataatcccagctactcgggaggctgaggcaggagaatcccttgaacccaggaggcagaggttgcagtgagccgagatcatgccattgcactctggcctgggggacagggcgagactccatctcaaaaaaaaaaagaaagcaatgcaaaaatagaaaaagagatacaccctgcacaaggacagaataaagaaagtattttatcttctatatcaaatgtccttgtctttttaaaaacataacactatgatctgcctgtcccttttgcacccacagtcaccaccctgatccaatcatctattacctgcattatttatactacacatttctatccgctatcacattcaacagaaacagattttatatttaccaagtgtgcctatattgtgctagatactatgtatttgctaggtccacgtaattctcataataccctctcaaggtatatttccctccacttccccttcaccttttttttttaaatcagagattgagacacaaagaaaccaagtaatttacttaaggtcacacagccagcaagtggaaaaccacaatctaaactgaggtcacatgctgtcaaaaacaacaacaacaacaaaatattgctccttggctacaggatttaaaaagggaagatgtactgaccgtctactttgctgtactatctttcactaccatatttcttaagcctctcaacaaagatggtggatattatcccccttttacagataaggatatcaaggttcagggaaataaatcactttcctgaagtcatagagccagtaaatggcagaattaggatttgaacttagggctgactttaatatgttgtttccaaaactccatctatttaccatttactgtaactttctagatttcatataacttgtctcccataaaagattatacacttcttaaagataagaaccagatcatggatattttgtgtcctttatagcatctagcagtgctggcgacatgacacagatacaccagttgatctgaacattgttccattctccatatcaccacaggagaatttgaaaagcactacttttctcaactcacgtccctgttgaagatccaatgtttccctattacctcccataacaaatccaaactccgtgacctaattcctttttcttactttttaacttaggcaaaacatatgtttagtgtgtaaaacacactaacaattcgttttttaaaaacatacatatatacccatgtaaccatcattcatatcaatatacataacatttccaggctctggaggttctctggctcctttgctgttaagtaacccacaacttccaccagataaccactgtttttactttataaccattgattagttttgcctgtcctttaacttcgtataaaagtattcatagaacacattatcttttgtgtctggcttcctttggctgacataatgtctgtgagattcacacacattgctgtgtatatgagcaatttgttcactgctgtgattctatcttaacagaagcaagttaacttagagaagaagttatgcttgcctgtcattttgttttgttctgttttccaagagagaaccttcctttattaagatttactgtgtgtgttacgagcctgaacatctagtcattaaaccatctctcttttaacgttatatccttcccaagttggtttctaccacagaaaggaggcagagtatcacataagcaaccgtaattgagttactctagccaaggattaatgagctctgtttgggattcacattcattttgtatttactcagtgccaaggctacaaatgacaactttaggcatctgtcattatgaagaagacattgccactggtaactatggtcaagtcaatgacaatgaaggtgtacagtcagaacatacttagattagaaaggttttaaagacctaaatgatgtgtattttcaactagtaactactgttacatgtgtatctacatgtagtagtggaaccatttcaatcaattctcagttatccaacggtggtaaattcagctcagccaggccctggccaaaaaaggagaggcaatgccaggcccaactaagatgaagataactaagtgaatttctggttacttttaaacatattctaaagataaatacaaatgttttacactataatttgcaaaataccttattatgtacttgactccctgtttaaagtaaaaagtgttaaattcctccttctcccaaatacattagaggaaatatgcatttctgctatctaaatgaattctatagtgagtccttttataaaacaatgcttatgcccttcacatatattttataaatctgaattttaataaaaatataattaaggcataaataaggataagggtgatatttcttttagattctagtaaaactttgtaacttgagacatgttgcattgttttatactatttgtttaccatgactataaattatccaaagtcattaatatttaagtcagtctgtaacactttggaaggaatatctgactctgagccaaataacaatagttaattaaataagctctcattaaaaaaaaatgctccaaagaataatttccatggtctctgatactatattttcttgataagagactctgcagttctgaaataacattccctgggcagtgagctttagatatccaactctgctctctggtgggcaacactggagtgtcacctgcttctcacaagatctacttggcatccaggacaaaaagatactgaacagtgaacacaagagattatacagaattgagtaaaataagagtacaaccatatccctcagaatataattacacattaaattaatattaaaaccaacaattagcccatttagggaaatgtatttgtgactttaattgaaattgctcacttcccatcccagtacttcacatcttttttcctttacttttctccattgcacttatcttctggcatattatacttcttatacactttgtctttccctactagaacatcaactacacaaagataggtattcttttctgtgttgttcactgtttaatctccaatgcctagaatagtgtcagatacatatgttaagaaatatttaacgaacacgtgactttttttgtgggggggagcgggggacagagcctcactctgtcacccaggctggaatgcggtggcacgatctcggctcgctgcaacctctgcctcccaggttcaagcatttctcatgcctcagcctcccaagtagcagtgattacaggcatgcaccaccatgcctggctaattttttgtattttcggtagagacagggttttgccatgttggccaggctggtcttgaactccgggcctcaagtgatctgcctgcctcccagagtgctgggattataggcgtaagccgccacacccagccccacatctagccccaagcacttttgtcatttcaaaccaaatttagaaccaatctgataaagggggtggacttggaatatgggctttccaaaatgctggaaagctgaaggcaaagatatacacggctcaatgacacctggcaactgattctgcttttcctcaactcctcaaacgaataatgatgtgatcctattaattctaaatctggtttaaaaagaacagaagaagccaatgattctaattattcccttaaatatagattactgagaaaggtcccctaaaattgtgatatgagtcccagagtataaagggcagcctgcccaaaattgagctaaattttttgattgatggagaccctttgcttgtcccctgggggcagttgtatgtcaagggaagctacactgagtgcatctgtacttgcctcttggggccatttgtcttctgattaagattttatatctttagctaattaaatagagaatttaaactaacctaaaacaatgtggattatatatagtccctttctagcaacctataactagaaaaactgcagctggtgccagaaaggtccaagccctatttccagtttaaatatatttcataagaaggtgaattataaagaagggtcctacctctcaagtctcattttataaaggagctccattgtaactgatctctaaaaatattttcaggccagatgcagtggctcatgcctgtaatcccagcatgttgggaggctgaggtgggaggataacttgagcctgggaggttgaggctgcagtgagctgtgatcgtaacactgcactccagcctgggcaacaaagcaagatactatctcaaaaaaataaaaaaacaaatctccctagtggagagatctgtttattttaaatgacttgctgaagtgtagcatggtaaaagaaacagaatcaggagagaaaggtaaaagaatgagatatgaaataaggggaaagaatgtgtagatcccaatttaaagacaaatgatatgggccttagttaattcccacgcccatgacagacatcaagtgagaggaagaaggaaagatgcagcagttgagagtcagttataaatcttagaagcgtgagaaccttcaacagtttttaaggcagctacaggcagacacagaatgaaggagaggttagaacagtaaggtagttcgaagataacaaccaaactgcttgaaagagagcaaaacttcatataattcttctgcttaaaaatcttcctgacttctcattgcctattgaattggggcaaactctcatgctagtattctaagttcttattatctgtgtctaattttacctttccactgttaaggctagaagatttcagtgcttgaaaccactgcagaagagacagaatcttagtcttcatttgtatttgcaatactgggtttttgagaaagtagtacagtaaagtctaaagcactgtaaaaatattagttacttctactgtataaaaatgcaaaaccctacaatcatttaccccaacttctttttatttttttaagagacagggtgtccctctgtcacccaggctggagtgcaggggtgtaatcacagctcactgcagccttgaactcctgggctcaagtgatcttcttgcctcagcctaccatgtagctagaattacaggcacgcatcaccatatccagctaattttttcattttcttgtagagatggggtctctctgtgttggccaggctggtctcaagttcctgtgctcaagtgatcctcctgccttggcctcccaaggcactgggattatagacattagccaccatgcacagcctaccccaactttttttagttttactgatggagaaagtagtctcaaaggtaaaacgacctattgatcaaagaatagaatggtcataagaacactaaagcagtcacagaaaacagctcaactttgaaaaaagttcagtgctgtgggtaaatgagctagttataggagagaaggagtaaggaacctaccttagtgactgtttattcactgtttattcacagaggaagaagagaagggaagacagctgtctactactttctggtagggaatgaaagaagggcaaagatctgtgtttttttttttgttgtttctttgttgtttttttttttttttttaaagtaaaacacctaagcaggcagaaaagcagatgccttctggaggcattaaatgttttcgggcacagaaagacataaaaaggtacactctaaaagtatgtgcacttctgtgatgttaaagggaatgaactcatatagatgataactaatagttaaataatgatcttgagattacttctagaggtgtttatatcaaagaaagaaacagaaatgcggactatctggccccacccccacacctactagatcaatctgcattttaacaagatcccaaggtgattcatgtgcacattaaagtctgatggcactactttagaccacatctattctttccctcttccaaaaccttgcttcttcaattattacttctctcattcacacctgctacccttttctacacattggttccctcacactgccctaattgccaaaaagccttctttcctatctgtaagttcacccttcaagatcccaggacattatcccaatacttttcctcgtcctccacatccaattcatcagcaagtcctgacagcttcacttccaaaatataccctgaaaaattttttgtttctgagatggggtctcgctctgtcactcaagctggagtgcagtggtgacaatcatagctcactgcagcctggaattcctgggcacaagtgatcttccacctcagcctcctcctagcatatgccaacacatctgaacattttataaacttgatgttaaaaatatattttttaatcgaagatgtctttaaaataaaaatacagataactaggttctattccagggaaactgactttgtgagtctgggacaagttaggcctatcctatatattgttttcaatagctgacagccactgctatagaatttcctaagtcaatcataaaggcttcttttccctttttgtggcactgacaaatattggttttggtctttgattgactgatcgattgattttagaaatgaggtctcactaggttgcccaggtagcacttgaactcctgggtttctggactcaagtgatctgccttagcctcccaagtagctggcactacaagtgttaccaccatgcctggctatgttttgctttttaacagacaaggttttttttttttttttttttttgagacagagccttgctctgtcacccaggctggactgcagtggcacaattttggtctccaccacctgcagggttccggtgattcttgtgtctcagctgcccaagcagctggcattataggcatgcaccactatgcccagatgtttttttcgtattttagtagagacggggttttgccatgttggccaggctggtcttgaactcctggcctcaagtgatccatctgccttgacctcccaaagtgctgggattataggcatgagccactgcgcccaactgagaatacattaataatcttaaggggatccgcaggctaaaaaaatggacactgagataacattgcaatagaggtaactacacatctccaaaacagatctgccttgcctgtcatctcaacaagcagcctgcgtctcacttctcagtaagaatgcctttagcataaacacattttattcaaagctatctgagcttcacggctgttgattaagccatcattttgacttgcctacaaggttacacaaatcataggtactaatttggggctttaaaactgcagctagactcttcattaccaaagagtcaggttcaatgaaaagaagtcatttgggggattgtaaaaattttaaaaccttatacacagggccaggtatggcggctcacactttataatatgcacaatctttgggaggctaaggtgggaggactgcttgagcccaggtggtggagatcggcctgggaaatatagtgagactgaatctctacacaatttttttaataaatgagctgggcatggtggcatgcacctgtagtcccagctacttgggtggctgaagcagcatttgagcccaggagttgaaagttacagtaagctatgactgcgcctctgcactccagcttgggcaacaaagcaagactctgtctctaagggggaaaaaacccttacacacagaattctgtagtaaatagtttaggtagaatcattaagtaaataatcctataaaacattcatactcaggatttggtaaagttggatctactatttctctgaggcaggagtaggggaggaaaaaaatatgtgaaacatatctgccctaattcttaccagccaattaccacgctctaccaatgatgaggacatcaatcttagacacatcattagttcaaagatcattaaagcaaacatcaaaagccaaaaggatgcttattatctacagcaagtattatctgggcccttttccacaactgtttgcagaaccttcattcctactatacctccatctttttttttttttttttttttggagacggagtctcactctgtcaccaggctggagtacagtggcacaatctcggctcactgcaagctctgcctcctgggttcaagtgattcccctgcctcagcctcccgagtagctgggactacaggcgcataccaccacgcccagctaattatttgtattttagtagagacggggtttcaccatgttggtcaggatggtcttgatctcctgaccttatgatccgcccaccttggcctcccaaagtgctgagactgcaggcatgagccaccgtgcctggcccccaccatcttaatctaaccctaaataaaggcaaattatgtagcagatatagcctctgcaagacagtcattccaagcaagaagggaagaagtaacatttacagaactcctgctacgtgccaggcactatgccttgcatgcttacatttaatccttgattccccaaaaatccaataaggaaaatatttcagatcctgactgaatctcagacaggttaagtaacttacctaggatcacagactgttaagtaaaagagtcagaatttaaacccatgtatgtctgactccaaagcctattttttcctactatactaagatgcctctcttctgtaagaatttaagagataaaaatgagattatttaaatgcatttggtaaatgaaatttctgcattcgtccactcaacaaatacttaagaaacagctattgtgccaagcactaggctagacatgttaaatatgaactgagcctttagagcttaaggaacttgtcccaggatataaagtaatgagaagactagagctcagatagcctgacttcagagattacacactccactgctccactatgctgcatctctaagatttaaaggaaaacacaagtgaagcattagtgttttccatcgcagtgaaaaaaagtaggccattttaactccatacagtcttgaaaggaagcctaataaagggcctactggctgacaaacggaaacatttattctttcctcaaaccaattgcagttttatgcatattcattctggacatggatagtattaataataaagtttcttaactgtcttgatcataaataatattaccacctcatattttagtgctttttacattttctaaaatgtttttacatacattaacaaatataaccatcaatagctccgtctttatttctacagaaagaagccaaatgttctggcatcgatccaacatcccttacatctctgcctttctagcttaatttgctacccatcatactgaaaaaagttatgtttcagccacatgattccctgaaggttctatctttgtttatggcactgttcatacaattccttttgcctagaatggtcttgttatctacctggtaaattctgactactctttcaagagctatcttccctatgaaagcttcagctcactgagctagtcactccctcctctatgaccaccaaatcagtttttacacatctagcataggatttatcatcattatagatgtgttttctttttcccaagagactgagctctttaagagcagtgactatgtctttctcatctgtttcctcagtgccaaactcatagaaggtatttaatatttatgaaatgataaaagaatgattatacagaccactaaactacgaattagaaaatccaagtccaagtcctacactaaaaggcaaagtaagttttaagctcagttttttcagtgtaaaataagtaattttcaattcaattaaacattcgttgccatgactaaagcttcctaatcattactttaacagatgggaatattctgagagttccttagaggggtcacaaaaaaatccaaattttgttattacctcctccatcatgacgtcctgtgtggccgagatttctcctttggttgctccactgtgtaccaggttccgcagtcgtatacagaattctctcatctatgacagaaacttattcagcactccaacagttacccgaattcaattgtaaatgactctcatagaccaacgcaagttctattttgaggtataactcaggccagacccatgacagagttcataaaggcaaatgtgtttttcttcaacttgtccacttaaacacatagctaaaaatgctttccataaggagaaaaggcataagttactcctccaaaatactagacggaactgctccttctctgcaaacatcgcataaaggtgttttatgtgtctgggcatggggaaaacatgtgatcacataatgcctatcactcagaaaaagcaggagacaagataattatgccactatgttactctcatagatttttacttagaatttcaatagctgtccatttttccttctctgccggctgactatgactatggttatgccagcccccaataaaattttcattttttcatttcattttttcaccaagataaaggtgagtctgaaatttaaccacagtgctaaagaggatgttgctctgacttcaaatggaatcaaatgccgtactattaatgatcttttagcctttggataagaatccccagcgtttccagggtggaaaatagtctacttctaatgttggggagacacacctatagttgattttaaaatgtaatctttctcccagggagatgaaaaatccaatttcagcctcatggattaggacagcagattctggcaactcccagttctcaaaaaccatgcctggctagcaaagcagcatccccgtaggaattataactctcctagggaaaactggttatgtagagaagacacaatgattcattaagataactgaagcaaataaaaagcagttcaataactacaacaaatctttagtgggtggataaaccacattgatgtggtctggggaagtctcagaacacagcacactctttaagggaatcttgcgaatagctctttttggttttactagcacataaagcagtcctagcccacctccactagaaccaagtgagagacaccgcaccctgtgtgcttgtggccaatattaattggacatgggactttatttcctaactatccccctaagaaaacattaacatcaacagaaataaaagtggaagttttttaaaaggaaaaaccctctaatattaattatttttaaagttattaagtagctacattgcttttgacagacattgacattggtagttatcttgtacacaaactgtatacagagatacccaggaaccccttttaaaaaataagtttgaaggaaagtacactaaactcaatcccaccctgcttcatatattgtaccttgtgattcagaatatcattcatccttctggttgcctctgttgtataagattcagggaagcatttcttagggataacaccatatttttctaaaagaaaacaaattctagtgttaaagaaggtaaaaaattagaaaccctggcaaaaatagtgattgtttcaaaaaataggcgatattttgctggcttacttcagaaaatcttatacttcatattatgaagcagggttttttgttttttgttttttgtttttgacagagttttgctctgtcactcaggctggagtgctgtgacacgatcctggcccactgcagccttgaactcccaggcttgacctcctgagtagcggcaactatggtgcatgataccatgtgcagctatttgttttattttctgtagagacagggtctcactatgttacccaggctggtactgagctcctgggcttgagcaatcctcctgccctggtctcccaaagtgctaggattacatgcctgagccaccttacccagcctaagtaggtttttaatgtgcatatttatctgtctatgttatcctttttatctactatactttgtcacttctcagccttttggtcaagctcaagtgtatctatcatacttttgtaaagtgctcagcatgatgagatttccccaaaagatgttttgaagacattttaacacagctacagttttaatgtgtttcctgattacatcaatggagaagaaaacaattttttcatggaaaattagttctccttaatactaccttttcttctccaacccatccttcacagtagctctctccttaatcctcatttaagaaggcactttataggtgagaatgtgaactaaaggtccttagaaataactatatatccttcttggagaccaattctactctgtacacaaccaccaaagaattggcccatgcctaactacaggcttacttaatcatgctgagtttcagttccattaaagaaagaacttttaccaacaatattaacaagcatatcccattggccaccatcatttgcagggttcataagcaaaaactgcaccagcctcccatcctcaggctcctttctctgggctgtgtccacaaaagcactcaagaagaaataacagcgttcaacctaaagagtaaagaaagttaaataacattaaaagaaaaaagtgtcaataattttattggcattatcaacagaatgggagtcttggaattaccatggaatcaacataatagttttttttctttttaaaaacatgaaaccttcatgaatttgcatgtcatccttgtacagaggccatgctaatcttttctgtatcaccccagtttggggacttacgatgctgaaacaagcaccataataagtatttttaaactaaaattggtaaataaacatcagtatctgacttcatcagaatatctgaagtttcttcttttacctgtgtatgtatcccaatatattgtgtatatgtgtacagtgtttacattccaatgctaaaacaaaacatttaatgaacacctatgtaatatatattttatttacttatttatttttagacagggtcatgctctgttgcctaggctggagtgcagtggtgcaatctcactgcagcctcaacctcctgagctcaagcaatcctcctacctcagcctcctgagtagctgggaggacaggtgtgcaccacgcgtggctaatttttgtattttttgtagagatggggtttcgccaggtccagactggtctcaaattcctgggctcaagcaatcctctcacctcagcctcccaaagtgctgggattacaggcatgagccaccaaaccaggtcagtaatatacattttgaagattaggaaatggaatatggccaggagtggtggctcacacctgtgatcccagcactttgggaggccaaggcaggcagatcacttgaggtcaggagttcgagaccagtctgaccaacacggtgaaatgccctgtctctactaaaaatacaaaaattagctgggcatggtggcatgtgcctgtgattccagctacttgggaggctgagttgagaggatggcttgaacccaggaggcagaggttacagtgagccgagactgtgccacagccctctagcccgggtggcagggtgagactgtctcaaaaaaataaataaacaaataaacaatcaaataaaattatttactgtttttcagacaagttcttgagagggaaattaggtcctagaaaagaacaaataacctaaaaagatgttaaaaagggagatatattgaattgaatattgaatataaaatttaaaattttaaatagacaagcaagcagtaagatgagtcagtaaacttatttcattgcaaaaaaatggccacctaccaaccaaaaacagttctgcctttgaaagagtcaacttttgatactctggaagtcagaataaaaggtgtctcacctattatgaaagggcaggctataactggaaaagctacaaaagaagaggcagtccctaccaaggctgatatcaatacaaaaagaatcttgccagatctgtcccataccttgtcccaaaaaaacaggtaagattggctaaactcaaattcttcaatatttaactttttcatgaatggaagcctcataacattcagacaagaaaagatccagcatcgccctgaaacaagaaagcacatcaagaaattatgagggttcacatagactgcactgctccaactgtatttcccaccaatgaactcatgacacgatctggacaattcagaaagagtaaatcagaaagagcagaaagattaaaaacaaaacaagaaaggtggtaattattattagcaatatatatgcaaaggtttaatatctttaacacaaaaacactctttacgtatcaaataaagaatccatttttcagagtaatgccttctccaaattgtactctacttcaaaataaattaactgagagcgccattagaaaagtcttttaaggtcttaaatacagggaaattatctcttttctgagggaaaattctgagggaaaaactttgacttgtattgggtataacctttttactaatatgaaaatatgtttataatatattggtaagtgaaaaagataggtagcttacataacaatgtataaggtatcaatgcatattaaacactattaaacacacacacacacacaaaacttgacaaatatacaagaaaaatatttacttggtatttacaaatattctacattaaacaaaaataattttgtaacaagaagaaaactctagttaactatagtgttttatgaaagtcactagtgcctattagttcgtctttaccttacatttacctgtatgtcacctctcttctatatgctatatatttctagtagaggggatctggatgcactggtgatgtgaaaactgcatgaaaataaactacacaactcacatgctatttggatcttttgtatgtaaaagtgacactgcaaaatgtgtaagacctgacctgttccctaacgggtcactgcaatctaaactatgtaggaccactgtgacattactaactggatcatctgtagcctgagagcccacaccactccaagcactttcttctaaagcaaaacattaattattgtaaggtcttgactttttccttaacatttaaaaaatcaactttattcaggtataatgtacatacaataaaatgtactcacgttaaatgtgtgctttgtgagttctaaccgactctaaacaagcactgatgtgcttcctgtccgtatagatagactggggggtcgtttttaagtatagaaagactttaaaaaatccgtttagtacaattttgttgtgagaatgtgctccttatttagattgctggatatccaatctttcactatacctgttttttctgagagtggtgctagaaagcagatagcaaaacgagacttcttgaccagcaaggcatgagaacagaacttttttctgtattacaaactgatctactggtgggaactgagcccatcagcacattagcttcagttgtaaccaagaagcatatttaaaagtaacatctgatgacattttaatgtaattacattgtatcttttctatttcatagtatagggccttcagggcatttctggggagtcctccaaagatatgaacattttcacatgttctgttttgtgaccaagaccatacatctccaagacacgggctacaaaccacacagcattggaacataatatagtcaattacactcaaacgtatactcatggacatgtcacttttgtactctaaccgcatgtactaacaagccacagaacagcaaaacaaaccacatgggtaatgttcttagacctgcctgtacctgtgcctcattctttacgaatttacgaccagttctttcagtacgaatttaagaccactcttaaataagacaccaaaatgggacgctgtcaggaaggtcaaggaacgtatgggagaagtggaagcccacacctgagctcttctggttggtgattggcttgccctcctggggcacggcgtgctggaacacatgctgcgcgcgctgcaccgtggcccgcttcagacagatgtccagcaggtcgtgggtggtcccgacattctgggcaagtacgaactgggggtcggaattcagtttctgtatcagagcagctaccttctccgaattcagtcctgttgggagaccaaacaggattttaacgcaaaaagagggggaaagggctgatctggggctcccgcgtcccgaatctaacttcgtaagcgcatcctggggtgcccgctgcagcggggaaacccataagcggcatcctcctccaaggagctgtctccctccaggccgatccagcctgccccgaaagctccctccccgccatcgccaagggtcccagcccccggccttccccgccgccgggcctcacggggaccgcggagctcctccagaggaccgcggcgggggacggcggcacctcacccgagctgctcatggcgcccacgctgcccggcggggtaacggtagcttccagggtccttgggcgagcgccgggattgcgctgcggctcgctgcctagggggcccgacctgtctctcgcacccggagcgccggaaaaaggaaaccggctcggcggcggcggcggcggcggcggcggggaggctgaggctgggagaaacggggtccgcggagggacaaaactcccccctcgcgttgctgagtcagcgccgtcggggctggccccgcccgggggagggccgacgggggcggcctagctgacgcgctgggtccgccagcgcccgggggctgaggccgcgcctgcccccgcgcaggaccgcacagatggtctgcgcgccagggcggcgccggcgccttctccccctaggttcccgcctccgggccgcgcgggcgccctcccgggatcaggcccgctccaaggagggaggctgacgggttccctgtgggcccagacccccagtactctagcatcggggaatcgtccccaggaagccttgtgagaagccaaaagggagctcgaggcgggagggaggagctgagaggtcccataattaagcgtcgggcttaggacgggtcgatatgtcacaaggaatgcacccgaaggctcttcctataggcttcgtttgctgaccaatcactgcattctcaatggcaacttgttgcttggattctcatcagaagcaaataattgtctttgagggggaatgggaaccaagctcttccccacccactccaaagctactaccagagttctacaaatagacatctgctcatttcaagaacactacccatctggtcttcacggagtccacgagtggctcctgtatagtccagcatgtcccgttgggtttaactcaggaggatgacagaggctagccgtatgcatcaatattgtttcgccgagttctctacaaaactaactgatgctccccctctaggctttcaagataactcaacagtttcccaaagttttgagattgtaaaaaccttgtttttgttgattccgtgtttcatgccctgaaatctcagcccttagtaagatgctgggatagaacccacagagagtaaaacaaaaacactgaaaccctgtatctgctattcaaaacgatgaggttgagtgtgtgtgtgtgtaacctagaatctaggtcttcttagattgaaaatcatcgcagttctaaggaactctgatatctggaaaaatccatactcaggcaccaatcagtcatttgagaaagcacggtttctatgtccctagagagactcggctaaaaattggggctataacatagcaactatcttaagtgggcccatcaaccatcctattctgaggttctttcaatatctgaaaaagaagaggctgaaaattatacagaaagaaatcactggtcctttcacaaaatgatgttcaagcatcctgcccaattcaagtcataaatttttattcagtatctaacatgtactaggcactggacaaactgctgatgacatagagacgaacaaagcttaatcttgccgttaagaaactcaatgtagtaggaaagagatgcaaaacaacttttagactatctgtagtagcataccaatagtgctgtagactgtagaagcaatgaggagagcactgtcaattagggccaaagggtgcctgaaaatagaagtgacaagagagcatgatcttgaagagtggatgagatttttacaagtcaaagaacaggagaagggcattcaaggcaccagcgaaggcgcagtgaataaaatcatgttcaagaaagggtgcatcataatcggatgtggctaagagcaaggcatgttttgggagcagaggcaaggtgtaggactggaaaagttttgtaggtttgggccaagatataaagggttttatgttcaatgcctgagcatctggactttatcttatggttaattagaagacaaaatgggttttgaaacaaaggaaaaatatgctcaagtctgtgtaaaaaaagaaacctggtggcagtggggagagtaatttggaggggaggggctctggagatagggaaactggttagaaggttcttccagtagtgaacttgggagaggacaaaagccttacattgcggaaagggaagaggcattgataatcttgaagttttcagcggaataagaagatggaaggtggtgtcattaaccaagagagggcatacagaaaaataggcatatttgcatatttgcaagtgtgcagatctgaactgagtttgggccatagcaaaattaggatgccccacaggacacccaggaagagaagttcaggacgtagatgaaaagatgtctagagattagatgagacacataggttcgaggtggaacaatgaaagtcagcagggttacagagggaaagaggatagagcaataaagagatgaagaccacagatagtgccctgggctgcaatgtgcagttgcacagggtgttcatggcacaagggcaccaggctgagtgtggtgagtagggactaaaatgcagtccaggctctgcttgccaagccatgcaccctggcccaggctgtgcacagagtatgatgtacctttcactactttttttttttttttgagatgagtctcactctgtcacccaggctggggtgcagtggcataatctcggctcactgcaacctccacctcctgggttcaagcaatttgcctgcctcagcatcctgagtagctgggattacaggcacgcaccaccatacccggctaatttttgtatttttaggagagacggggtttcaccatgttggccaggccggtcttgaacccctgacctcgtgatctgcccacctcggcctcccaaagtgctggaattaaaggcatgagccaccacgcctggcccctttcacaacttcttataaggatgccatatgggagtagtattagctctgaaaatgataatgtttaaagtatgggtgaagacagaggagccagcagaaatagaaagatcagtcagcgaagtaggagacccggggagttatgtcctggaatcccaggaaggcaaggagaggacagtgaattgaattaaaagctgcagaaagtcaagtaagattggttttggcaactgggttacaggcaaccttagagagggcagttttagtggaagggaagggtgggcagaagccacatcgtaatgagttgagagggaggtaaatattagggaagctctttggggagaaagggtaaatttgtgtctactggaggatgagaggaaggaaccagtacagatgagagattaaatatgtgtcagagaggatacaattgcaagagtaagagctcaggaggagatggaatcactggggaaggtggaggggaccagttttacagctattgccaccctttccatactggcgattacatttctccaccccatgcccagagatttctatcatcatctctttgctggcctcctgctctgtcctcatcatcagggtggcacccttattaccagatttccacccagcaattcacacccatgcactcagcccccatatgggcatggtgaggaggtacagaataaaaccggtttcccagtgggttacccccaaatgacctacccaggaagacatttctccaagaagaaaattctgtgttctatccttcttattccagccagaagagatgttgtacagcccggtgacacctcgtgggacaaagcaaccagaaacagaattctagtatgaagtctctaatattaaaaaagaaaatattgcctgtaatcccagcactttgggaagctgaggtgggaggattcctgccttgagttcaaggccaggagttgaagaccagcctgggcaacatagtgaaactccaccactacaaaaaaaaaaaaaaaaaaagaaagaaaaagttttataaaaaattagctgaatgtggtggcagacacttttagacctagctactcaggagactgagacgggaggatcacttgagcccaggagtttgaggctgcggtgagctatgatcacactgctgtactcagctctctctaaaaagaaagaaaagaaaatctttataaatcctgtgaggcagcaccatttgccactgcagatatgccttctgcctgttgcttccatgccactctaccaagttaaagcaaacaaggccagtctcaaggcaaattttccaccctgtgtctcctcctttgctgtccaccaatctttgacatgtgtttgtcaactacttcttttttttttttttttgagatgaagtctcgttcttgtcccccgggctggagtgcaatggcgtgatctcggctcactgcaatctctgcatcccaggttcaagcaattctcctgcctcagcctcccaagtagctgggattacaggcacctggccaccatacccagctaacttgtgtatttttagtagagacggggtttcaccatgttgaccaggctggtttcgaactcctgacctcaggtgatccgcctggctcggcctcccaaagtgctgggattacaggcatgagccactgtgcccggccgcaactacttctatttcaatagaaaagaccaggtttttatgttgaatggaagtctaggctagaatctaacacaaacattctccaattctatgaaactcattcatacttaagtgttgtcccactaactccaagatttgccttggtcaggaagcctccttatatttcactagatgtgatagtcagcttcagagttcacacattggtagtctactggagcaaattcagctttgagacgttttgtttggcctgcatggtaatttaaaatttttgagctggccgggcagtggctcatgcctggaatcccagcactttggaaggctgaggcaggcagaatgctcaggagttggagatcagcctgagcaacatggcaaaaccctatgtctataaaaaatacaaaaattagccagtgtgatagtgtgcaccttagtcccagctacttgggagtctgagatgggagggttgcttgagtttgggcggttgaggctgcagtgagtcatgatcatgccactgccctccagcctgggtgacagagcaagacgctgtctcaaaagaatttttttttttgagacaatatttataactgggaagtttcagatccaaatctgggtagctgccttctctttaaaatattgttgttttggctaggtgcagtggctcatgcctaccactttgggaggtcaaggaggcagatcactcgaatccaggagttcaagaccagcctgggcaacatggtgaaaccgatagtgacaggaggcagtcaaatgcctaggcagataggggtgggtccccggtgaaatcccaccttcaagccaaagacagtttaaagcctgaaagccaagctacaagtcttggatgaatccatggactggattgagaacccctcttcctgtttggcatggtttcctctgactgagccccatccttcacctaatttacatatacctacccttccctaattgatttttgacactgttgtgcctttgtttcagcctttttgccatacccacaaaccaatcagcacacgctgccccattctgagcccataaaagccccggacccagccacactgggagagagaccacccaacttcaggtggcagaccattctcgcattccctctctattgagagatatttcattgctcaataaaactcttctccgccctcctcaccctttgattgtcagtgtagtctcattcttcttggaagtgggaccctgctgaatgcaaatatgaaaaggcagtaacactgtagccctctgccctgcattggcacctggcagctgccccacactatgacagggctgggccaacccagagccatgggctagagcagggcagtgggactgatagaactgttaaccccagactaaaagagctgttagcatgttgtaacaccccctctggggcttcagggtcacaggcttccctatttgggcaccaccacattcccctcacctggatgccagagtccaccacaggagtctcttgcgacaggtgtggtccaactgcaagccccacatggagcccgcttctatgccagcacttggagctgctggccagaccctgcactcgctcacccacacaccccttcccactgggggctgagcatgcaattgtggtgcctgtgggatccatgctggagcacaaaccaggcacagcctatgggctgagtgggctggatgcctcctgcagcaagcccagtgccaagcaaggccaggacaggggcatcactggccagaggtctctggctggcaaagcagccgagaaaaatcccgtgtcaaaaccccatctctcccaaaaatacaaacattagccaggcatggtagtgtgtatctatagtcccagctacttgggaggctgaggtgggagaatggtttgagcctgggaagcagaggttatagtgagcagagattgtgccactgcaccccagcctgggcaacagaaccgaaccctctcaaaaaaaaaagaaaaagaaaaaaaaattgttgttttcccatgatagtaatttctgcatcaaaagagggggaaaaagtgttacatttattgcctatggatatttgcgttttcaactcctgatttagaatgacctgggtggagtttgggaaaattatttttccccttccactctcatccccattcttatccttgtaattcccacctccctgagatgagcaaagccagcaggtgtgaccctgccaaaactttgagatattggatcctggggctttttgggcccacaggagcctatatcccttcactataacttttctccagaatgtggcgtgcacccatctgtgtccaggagaactggcagctttctgacatccaccttccctgccactcctaaactccatgtgggcttaacccaacctgtggcctctccttcagcccaaagaactttagattcaggttttaaatgtttcagcatattcaacattagttgtagattattttggggttttttttttgaaacgtgatccaatgttcttgaatgttgttgcttacacccacattattctcacctctggatataacatttctgccagtcactgctctaggtgctagcacttcacagagcattctaggcagaggaaacaacatatgcaaaggtagaggcatgaatggccttgagtctgattcaagaacaatgaaaaagtttgagttttatgaccatttgagttatgcaaatttgaaatcattcattataaaccattaatagtacttcattatatacacaaaatttgaagtggtgtgaaacctttgtaatatttaatatttgtcaggaattgcatactttcaaacctggtggtggtaaagtgagttagaaactgtttatgctagtgccacatggtggagccattttagctggaaaaatagtatctttccttcaataaattcacatttattgctatgagaaaaacagtcttggattttgcaagttttaaattttatgtgaagatttcaggaatgtatccctttcataaaattcggctgctctagaatttggtgtggcagtagcatagagtaaatggcaggggaaaaaatgtatataggagataagagatgaggttgaaaaaatggtttacagtcaaatcatgaagccctttgaaaggtatgcatcttttactcatggggatatgactctactcacaaaattctcctatatcagtaaaaaaaaaaaaatgagagagaatcaacttcaaattatatttcccataaagggaataggttgacattatattttccccaaatttctctctttcattcatttatttaactgcttgttgaacacctactgattggcagcaactgtactaggcacttgaaatacaaaaaatgaaggagactagtccttgacctcaagaagcttcaatctaacagggaaaatgaacacaacaaaattaatcattattttttgattaatacaaaaaaattcagctgggtgtggtggctcacacctgtaatcccagcactttgggaggtcaaggcaggtggatcacttgaggccagaagttcaagaccagcctgaccaacatggtgaagccctgtctcaaaaaaaaagaaaaaaaattcatagagcattattacatgtcaggcactgtattagatacagaaatacacaggaaaaccatatagacaaggtctttcccttctggtgcttgcattctagtgggggagttagacaataaacaaatatatgcagataatttcaaatagtgacataaagaaaataaaacacaatgatgtgatagtgactggccagggggagtagtggcattaaaggcctctttaaggaggtgactatttgtcctgaaactgaatggcaataaagatctggctttgtgaggacctgtgggagaaagcaagggcaagggccttatagaaacaagcagcacttaacaaggtcattgggttcattttgcctgctgcccagatagagccaatttatcacaacaggggaattgcaatagaaaaagggtttaatacacgcagaaccagctaattaggagaccagagctttattattactcaaatcagcctccctgaaaacacagaggctagggtttttcaaagacagtttggcaggcaaaggaatgggttcagctgattggttggggatacgatcatagggatgtggaaactccagtccttgtgtgttgagtctacttctgggtgggggccacaggaccagttgagtcaagagtcatgggtctgggtgaggctatctggttgtcagaaacgcgaaagcctgaaaagacatctcaaaaggccaatcttaggttctacaatagtagatgttctacagtagtgatgttatcagtaggagtaactgaggaagatgcaaatcttgtgacctctaataatggctggtcattatttgcacctagatcttagcagaatccatgctgctctaatcctcctaacttgatgatcttttattagttttacaaaggcagtttaatttggggaaaggctattatgatttaaactataaactaagtttctcccaaagttagcttggcccaagcccaggaatgaacaagaacagtttggaggttaaaggcaatatgggagttattagatcagatctttttcattgtcataattttctcactgttataatttttgcaaaggcagtttcacttcctctttcaagtccagtggaaaaaagtctggctttttcttactccctcctaagagtgaaggccaactttcccagaagctttcagcaaatctctccctgaattttgtagtccaaaaggagatcacatgccttttcctgaaccaatcattggttaggagatgggattacccttacctcaatgaagcctgtccctagtacactggtcagttccccaaattgtattgtttctcctcagtgctacggagatgggatggttgtcgagagttaatcacagtgttcactgcatcatcacaagaagtttaggttttattcaaagtgtaatgagagttttaagaaatgagacatgatttgatttatgtttctaagggtaactttgaggataattataacacatttaattggaaaatataatattaaatatataaacatcaaactaacaataatatatataaagaactccaaaatatcaataggaaaagacaaacaatccaatagaaaaggagacaaaagacctaaacagacattttacaaaaaagaaagcataaatggcaaataaacaatgatgatggaaacacaaactaaaaagcaaataagatgctttcactggcaaggggtcccgatccaggcccaacgagagggttcttggacctcgcacaagaaagaattcagggcgagtccataaactgaaagcaagtttattaagaaagtaaagaaaaaaaagaatggctactccataggcagagcagcagtttgggctgcttgactaattatagttatttcttaattatatgctaagcaagggatggattattcattagttttttgggaaaggggtcgacgattcttggaactgagggttccttccccttttaaagttaattttttttttttgagacagagtcttgctctgttgcccaggctagagtgcagtggcatgatctcggctcactgcaacctccgcctcctgggttcaagcaattctcctgcttcagcctcctgagtagctgggattacaggcacccgccaccatgcccagctaatttttgtattttttttagtagagacggggtttctactaaaccctgtctgaccatgttggccaggctggtcttgaactcctgacattgtgatccgcctgccttggcctcccaaagtgccgggattacaggcatgagccactgcgcttggcccatatagggtaacttcttgacattgctgtggcattagtaaactgtcatggtgccagtgggagtgtcttttagtatgctaatgtattataattaatgcataatgaggagtgaggatgaccagaggtagctttcattgccatcttgatttggtgggatttggctggcttctttactacatccttttatcagcaaaatctttgtgacctgtaccttgtgccagcgacctactgcatcctgtgactgagtgcctaacctcctgggaatgcagcccagtaggtctcagccttattttacccagccccaattccggatggcgtcactctggttcaaacacctctgactattcccagtttatacctagataagcaaaaattttgaaggcaggtattaaaaaatatgttgacaattcttttgtactgctgatagaagtataaattaatattaccactttagaaaacatttgtcaatattttgtaaagttgaagacacacatactctataatctagcaacgctattcttgagtatattttcttgagctattctgtccaatatagtagccgctagatgcttgtggctatttaaatctaaattaattaaaataaaaaatttagtttttcagttatactagttatattccacgtgcttaatagccacacatggctggaggctacctcattggacggagagcatatatatagaacattttcattatcacagtaatttctctttccctagagaagttcttgcgtacatgtactataagtcatggtcaaaactgttggttctagctttgctggtgattgcataaaaactcaagaaaaatccacagttcatcaacagaaatttgtatgaattgtgatataaaaatctacatggatgagtttcagaagcaatgttgagtacaaaaatcatgtggcagagcaatgttgagtacaaaaatcatgtggcagagcaaatggcatgaaatctgttttcaaaatttcaaaaccaagcacagttaaatattgttttttttcttttttctttttcttttttttttttttgagaccgagtctcattctgttgccaggctggagtgcagtggctcgatttcggctcactgcaacctccgcctcccaggttcaagcaattctcctgcctcagcctcccgagtagctgggactacaggcacacaccaccatacccagctaatttttgtatttttattagagatggggtttcaccatgttgaccaggatggtcttgatctctggacctcatgatccacctgccttggcctcccaaagtgctgggataacaggcgtgagccactgtgcctggcctaatgtattgtttagaaatatatacatagatggtaaaagattttttttaacaagtgaatgtcaaacaccaaattcaagatagtatttacctttggggaggagacactgagcttcaaaggtatttatagtttcctatttattttattttattttttttttgagactgagtcgcattctgtcacccaggctgaagtacagtggtgcgatcttggctcactgcaacctccaccttcttgcttcaagcgattctcttgattcagcctcccaagtagctgggattacaggcacctgccaccatgcctggctaattttgtatttgtagtagagatggggtttcaccacgttggccaggctggcctcgaactactgacctcatgatctgcctgcctcagcctcccaaagtgctggcattacaggcatgagccacaatgccagcctagtttcctatttgttaagctgatgttgggtacatgggtgttcattctacagtatttgttatacctaattttatacattgtctatgtatttgtatatatgaaatatttcttctttaaaaggtcattgtgactgcagtgtaaatgatggacttaaaaaagaaaggaaggccgggcacggtggcttacgcctgtaatcccagaactttgggaggccgaggagggcagatcacctgaggagttctagaccaaactggccaacacggtctactgaaatacaaaaattagctggcggtggcaggcacctgtaatcccagctactcaggaagccgaggcaggagaatcgcttgaacctgagaggcagaggttgcatagagctgagatcgcgccactgcactccagcctgagtgacagagcaagactccatctcaaaaaaaaaaaaaaagaaagaaaaagtaaagaaaaattaaaaaagaaaggaatataagcagaagacttgttaggaggctataatttgtccagtcaagaggcgaatggtgacctggatcaagaaggcagtggtagggctgggctcagtggctcacgcctgtaatcccagcactttgggaggccgaggtgggcggatcacttgaggtcaggggttcaagaccagccaggccaacagggggaaaccccgtctctactaaaaatacaaaaattaaaaattagctgggcgtggtggcgagcacctgtaatcccaactattcgggaggctgaggcaggagaatggcctgaacctgggaggtggaggttgcagcaatccgagatggcgccattgcactccagtttgggtgacagagcaagactccatctcaaaaaaaaaaaaaaaaattagaaaaaagaagaaggcagtggtagagatgaaaagaaatagatgaatatggaacatattttggaggtggatcacattaaccctaaccctaacccttgtgctgtggtagagatttgcatggtgtgatgtggaatgtggaggaggaatatataagtcaaagctccctgggatctttagggaaagtttcttgggagagatgacagatcatctgagttttgcccggttaggagtttgccaagtgataatagctggggaaaggaattccagttaaaggaaatatgcaaaaatcttttttttttttttttttgagacagagtctcgcctgggctggagtgtagtggcgtgatctcagctcacagcaacctcagcctcccaggttcaagctattctcctgcctcagcctcccaagtagctaggattataggagcccgccaccatgtccggccaattttttgtatttttagtagagatggggtttcactatgttggccaggctgatctcaaactcctgaccttgtgatccgcccgcctcagcctcccaaagtgctgggctgcaaaagtcttttttttttttttctttttgagatagagtcttgctctgtcgcccaggctggagtgcagtggtgtgatctcggctcactgcaagctctgcctcccgggttcatgccattctcctgcctcagtctcctgagtagctgggattataggcgcccgccaccacacccggctaatttttttcgtattttttagtagaaacggggttttaccacattagccaggatggtcttgatctcctggcctcgtgatccacccacctcggcctcccaaagtgctgggattacaggcgtgagctaccgcgcccagccccacaaaagtcttaaaacaacaaaatctctgtttggaaactgagcacagctgaactaaggagatagagggcagggaccaagcgtagacagccaccagtgcccacagaggagttaagaccttatcctggaagatgcagggaaactgcctctatttttctttcctcctgccagggagaaaggaagatccttgtgaagaacaacaaaataaggtgctgatcctcagtgctgtgaggatctacctagaaagaagtcctggttgggctaccctaaaaatgcttttttgcattactcttaaaaagtgactaccacaatcatcaaaaactaaattttgttgaagtacagaaagattggaacaaagataaaaggaaaataagggcaaatggaagagaaagtgacagaggtgaaacagaggaaattgaacttgagagaaaatcacaattaaatacctttggagaccttagatcccagtttccttctgggaatgctgttagactggcattacttaaagctgcaaaaccaaagctttctttaattcttcctttgtttatgaatcacattctttactatctgaagcaaatgtttaagtataataattatggtgttatcttctttttttttttttaagacagggtctcgctctgtcgcccaggctggagtgcagtgctatgatctcgggtcactgcaacctccacatcctgggttcaagcgattcccctggcttagcctcccgagtatgtgggattacaggtacacaccaccacgcctggctaatttttgtatttgtagtagagacggggtttcaccatgttggccaggctcgtctcgacctactgacctcaagtgatccgcctgcctcggcctctcaaagtgctgggattacaggcgtgagccaccgcacctggccagaggctttttttaaaaaaataaaacaaagcataaaaatcacaaaacaaagtgaatatgcaggagttggtggctcagttccacgttttccagtgcatatcctttgtaatgttttttcatccaatttccactttttgttctcacttgatttttctttcatttaattttatttcttccttgttccaacaagagtgattcatcagataaaagtaaaactgaacacattcacagtgcaaattaaaattaaaaacaaaagataaacatgcatcttaccctgagagaaagaaagaaagaaagaaagaaagaaagaaagaaaaaaagaaagaaagaaggaaagaaagaaagataattgttccctaaaagtcctcaattagaactcttaatttcttacattaagtaagaaaggcagcatgcagttaggaaaaagaggccaaagtttgaagtctattatatctggttttaatagctttagtattttaatagctttagtatttaatagttttagtatttgtaggtatatgcattcatttaatctctgagtctgtttcatcttctgaaaaatggggtggataataatactagctatatagctaaaatttattgagtgcttcctgtgccacaggcattgttctgctttctatacaagctttagcccatctgatcttcacaataaccctaagtcaggaggtgggttctattaccattcccattttatagatgaggaaatgcaagaacagaaaggctaggtgacttgcacataataacttgcacagctaataaagtggtagagtcaaaatacaaacccaagtagtctgattccagagattaaaacttaaactctcagccgggcatggtggctcacacctggaattccagcagtttgggaggctgaggcgggtggatcacttgagcccaggagttcaagaccagcctgggcaacatggcaaaaccccgtctctacaaaaaaacaaaaacaaaaacacaaaaataagctgggcacaatggcatgtgtctgtgggcagctacttggaaggctgaggcaggaggatcacctgagcctgggagctgaaggctgcagtgagctgtgatcgcgccactgcactccagactgggtgacagagcaagaccctgtctccaaaaaacaaacaaacaaaaacttaagctctctaagcctaagtatcaaaagatataatgtaagtgaaagcactttgaaactcaagcactttagacataccagtctatacaataaacctgcagatttataaatggctgagtgttttcctatgtcatttttctaattgtcccaaagcaaccatttgtggatagttaatggaacataatcatgaagtttttcttaggcacacaaatttgcagctgttaagttttcacattagcccattttaattaatctgttataggtagaaaataatgaagaccactcaacatgacaaacaaggaaccactgatagaagactttgttatatgactaatagcactgtagaatcatacaagcattatccctatatttagagtgatcaagaaattgtgactcttaggctaggcatggtgacttatgcctgtaatcctagcatttcgggaggccaaggcaggcagatctcttgaggccaggagttgaagacaggctgggcaacatgtgaaagcccgtctctactaaaaatacaaaaatattagccaggcatggtggcatgtgcctgtaatcccagctactcaggaggctgaggggtgagaatcgcttgaacccggaaggtagaggttgcagtgagccaagatcacaccactgcactccagcctgggcaacagagtgagactctcaaaaaaaaattgtgaatctttagcagaaatatgaacttgttaatacatcattaaatattgtcttaaaaacgagtataactcacatctcaaattggagcaaagtcctttagactggtgatttccaagtgagtcaagtttgttattaaacacttttatgaagtaccatagctataaaatcacttcaggaattcaaggctatgattcttgagtggcaacaaagtttatatcctctttggtggaattgtttaatgatgctcttgagctgcccaggaagtagtaaggcctcctaagagttgtttcattattattttgggagttttgggttttttttttttctttttgagacagagtcttgctctgtcacccaggctggagtgcagtggcacgatcttggctcactggaacctctgcctccggggttcaagcgattcccctgcctcagcctcctgagtagctggaaatataggcgtgcaccactatgctgactaattttttgtattttgtattttttgtatttttttgtattttgtaagaacttggctcacgcaatctcaacctgcctgactcaagcgatcctcccacctcagcctccagagtagatgggaccacaggcccatgccaccaggaccaactaatttttgtattttttgtagagaggaggtttaactatgttgcccaggctggtctcgaactcctgggctcaagcaatcaaccggtctcagcctcccaaagtgctggaattaacagacatgagcttctgtgccccatctattgttaaactttttgaaaatatcaatcatataatatgaggcctcacaggatcttacagattatcttctggtctagtcccttagttttgaacctataaaagtttacatcatttgcttgagttgagcagttcattagtggctgagtcaggatgaggggccaggttttcaaagcaactgttcatggatccagtggcttcatgtatatctggtagctacaacttttccatgagcaatgttgaatatatacagcatagttgcgtgacaaactacaggaatctaactactcccttcagcactgaccatgttcaaagatacaagtggaattatgacttactcaaggatgaggctccaaagtcaaacaaaaattggtcgtagtcaaaattatccttgcaaattttttgggaaggcctcatcggagacccaaatatctcctttttgtaagcacagtagggaaaatttttattccagaatggaaagagagggctattttgtggttgagaaccaaatgaggtatttggcttccttttagggactatgttgtacaaaaaatacaaattcttgaacactagactcatcgtcagcacacaataggctcacgcctagagagccatgagggaactaggactggccagggaagccgatgctcctcccactcttgtgctcacttccaggcatgtgttctttgaatggaatacaggactcatcacggcacttcaagttgtgtgtgtgtgtgtgtgtatctctctcgtctccctttccccatttgcccctccctccctgtctttttatgtttgctttttaaaaagttattatttttcaagacagggtctcgccctgtcacccaggctgaagtgcaatggtacgatcttatttcattgtagactcaacctcctgggttcaaatgatcttcctgcctcagcctcctgagtaggtaggagtacaggtgcatgccaccatgtttggctaatttatttatttatttatttatttatttgagacagagtctcactccgtcacccaagctggagtacagtggcatgatctcggctcactgcaacctctgcctcccaggttcaagtgattctcctgcctcagcctcctgagtagctggaattacaggcctgtgccaccacgcccagctaatttttgtattcttagtagagacggggttttgccatgttggccaggctggtcttgacctcctgacctcaagtgatccgcctaccttggcctccccaaatgctgggattacagatgtgagccacctcacccggcctaatttaaaaaaattttttttagagacagggcctctctgtgtttcccaggctggtctcaaactcctggcctcactgctttctatttgaattcaaatgttaaatgtgtcaataatggagattaaataagtctatatatgtgtgctcctggagtataggaagtatcgtatacatgttcattcttaatgtaaaaggcaatttagcctagtggttaaagacccaggaccatactatcttggcccaaattctgatttagccaccaacaagttgtgtgacccagaacccatgacttaaatcctctgtgcctcagttgccttccctgtaaaatgggtatgatttaaaaatagaacccttgttctgtgattgttaagaagattgagttataatatgttaaaagtgctcagaacagtacaaggtaagtgctcatagggttgtaacttctgttaggtgatgccactatacgtcaggtaatgcagagaactcaattttgacaattcctaacaatacccaatggaaacaattagtatttgtgtgagatcatttattttgtcacctcctgttgccacttttcctgttgtacagtaatcacctgtaaggcaaaaggactgaatgattgtcctctacaaaactaagagcaactgtagtacttacttaggaccaaaaggcagggtgatggagaaatgactcttcttactagctctgtgaccttggaaagatcacttaacctttctgaattttagtatcatttagttgcaaatcataaataatgatagcactacctatctcacagagtggctgtgagaatcaaaccaaatatctgtaaaaatgttttgtaaactatacagtaacatgaaaatatgagattgttattactaactacaatttaaacaggctagcactagtgctgctatcaggagtgtcagaagaagtaaggacaaatcattcaggaattcatgggtttccacagcaacactttactgtagggatatgttggcaggaactccagatcttccattttttatgtatatatataaatatatatatatatacacataaataaaaatatacatatatgtgtgtgtatgtatatatatatagatctgaagttcttccattatatatatatctgtatatgtacatatatgtgggtgtgtatatatatgtgtgtatgtatatatatacaattttctgagaactcacttttttttgtgaatttacaatagtgttcgccatgttttccaccagtatgtatatgtaaacaacccatgatgtaagttgtttgccacatagcaaccttgaagttgcagagatagactcttgggaaaagattacctgagtattaggaaatttgtgattaatgtgtcaattttattccctatagtctctggcatgagattaatcatgatttgattttttaaaataaaatgagatgaattttattctggcttgcactactgttattacactaagttatattgtttctcaactcttccttttccttgccaataaaatggaggcttcaacgcctacctttcagaggttgttgcaaagatcggaaatgatctatgcaaaccccttgacaaagagtaatacttggtgattattatcattaggaggacaagcaaatatttagggcagcaattctcagctccagtcctgcaacactgcagggtgttgcaaattatctcaaggagtgttgtaacatttccaaaaggctctccaactaagattattgtaaatttcctttatttccagaaataatttctctgagggtcattagaagtggggttgtactgatatcactcagcatattatgagatatctcagcatattatgagagaggtgaagtttttattattcaacctttaccccttctgtgatatcctctttcctactccagtcccagggtttggatcagcccaggtatgaatctcagcttagtcactctctatacattaattatgcattctgaacccagcgtcctcatctccaaagttgcgacaatcatgaccatttcataggattgtttacagagtcaaattatgtgcataaagtcctcagcagaccataactaactgtcccctgacttagctcctcatgatcttgcctgatctctggggaagcaatgagtgagaattccaagagctgtttcacaaaaatctccatgagacaatgaaagcccaagtcaacactgttgtaacctacctgccagaggatggcatataggattcttctactcctagacattcaggattaaaacaaacaaacaaacaaaaaacatttttaaattagaggaattacacataaaaattcagatctctgacttctcttaaagaatcacaagatctggccaggtgcagtggctcacacctgtaatcccagaactttgggaggccagggtaggtgaatcacttgaggccaggagttcaagaccagactggccaatatggtgaaactctgtctctactaaaaatacaaaagttagccgggcatggtggtgcatgcctgtaatcccagctacttgggaggctgaggcatgagaatcgtttgaactcaggaggtggaggttgcagtgagccaagattgtgccactgcactccagcctgacagaacgaggcactgtcttaaaaaaaaaaaaaaaagaaaaaaaaaagaatcagaagatctgtccctgattataattatcagccttcttttggacacagatgtgctctctgtttgccacagtccccaccattccctattattgtacatctagcctgcttcactcattgatctgcttgatcaatgagtgaagaatttgaattcttcactgtaagaatttgaatctgtaagaatttgaatctataacccctggccaatagggtcaggaaagtagtcatgatggtggtgatgacaggggtaaagctggtggggaaagaggtttgtgaggtttttttcaatgattcaaaaagcctattggcaatgattatatctttaacctctaaaagactgcacaggttaactaaagctccagatttctttgcttttaggtggaattctgtcaactaggtaactgtattgtcataaaagaagatcaaaatggcaaacagatataattgattaatgttttaaaaattggaaaaacagataattcttattaatttttttattattattatttatttatttattttgagatggagattcacttttgtcacccaggttggaatgcaatggcatgttctcggctcactgccacctccgcctctcaggttaaagcgattctcctgcctcggcctcctgagtagctgggattacaggcgccaaccactacgcccagctaatttttttgtatttttagtagagatggagtttcaacatgttggccaggctggtctcaaactcctgacctcaggtgatccacccacctcagcctcccaaaatgctaggattacaggtgtgagccaccgtgctcggccttattattatttttgagacagggtctcactgtgttgctgaagctggagtgcagtggtgcaatattggctcactgcaacctctgcctcctggatttaagcaattctcctgcctcaccctccctagtagctgggattataggtgtgccacaccacacctggctaatttttgtatttttagtagagactgggtttcaccattttggccaggctggtcttgaactcctgacctcaagtgatcctcccacctcagcctcccaaagtgctgggattacagatgtgagccaccgcgcctggacagataattattattatttaataaataaaatttgcttcatagattagctcttgggaaaatggggcccaagaaagagaatgtgataataacaagaggtatccttactggtggagaggttgagaagggagccactggcattgtcacttctctgctgctacttttagtcctgtgggtcgaaaccagaagaatgaatgttgaaatttcaggtacctgatagtaagtagaaaagacatatggaaaaaggcagtggagtcctcttttgagtactagaatttcatgtcctcctcaggcaggctcactcatgattttagtgttaataatgtacatagtttttaatacaggttctgtttctcccatactgcaaggcaaaatgcaatgcaatgaccatttacaatattgctgtgctctgttaaaactagttaatgttccttgcctgtgctaatgtacaaggccactgtattttataagggtgaggaaactctttacttatgacctgtaattctcaagattattatatgtcctagaataaagctgattcataattctactaggtggggcaaagggattacattttcagtctttcttgccacctctttccagcatttaactaaattatgtaggatcttttgagaattatagaattttgaagctaacgtgtactttaaggataaggatctcctaatctaacctcctcatttcccaaaggtccaagagagtttttcctgcccaagttaacagagccaacactagaactctggtctcctgattccaagtccaatttgatatgtatgttttctgtttccttttccattttaaactatcccaaccatcattgcccaagatttgttttttgctttacggtctcacggcttctacttaacgtctaaatgttcagattttttcataatcctattttatccttacagcattctcctagggtttccagattctactttgagaactctcgagtgaggaacgtgatctggaggcttccccacaaaaccctgctggatcctccaagaagacagagaaatgtgtaacccacagtctgtagcagtctctctctcatccattccatactgaggtttccaaggaagcaaagagagactaacaggaggattatgtctgttctttttagaaacaagtctgttgagatttcatacattctgctaatttcttctttttgcttctatgtcaagaaggctttttaccacctgtctgacagcagatctctcttgcactgtggcacatttagctactgcaaaattagatgaaaacagttttgttttgtttttctaagacagaggaggagcacagaagagacatcaaagatgattctggccaaggctgcctcccctacaagctcccagttgtgtgggaaagagaagcataaactcttatgggggaaaaaagaagaaagaatggagatggggaaagtcaattataaattatgagagctgtggtttaaatgggagaggtacgagaaaagtacaggctgactcataattagtacagatagtacaacacaaattaccaatttcattgctctttgaacattcattgccacatagagctcacaaattttgtgaccatgtcaactacaatgaaatgagaaaaataggaacatacgctgagtttttcataatactaaatttattcaatttaaaggagcatcttatatttcaagattatagtcttctttctttctttagtcctaaaacatttcttttatgaaacgacagtgaaggtagataataattgattttttgtttgtttgtttttgagacagagtcttgctctggtgcccaggctggagtgcagtggtgccatctcagctctgcaacctctgcctaccaggttcaagcaactctgctgcctcagcctcccaagtagctgggattacaggtgcatgccactacacctggctttttgtatttttagtagagatggttttcactatgttggccaggctgatcttgaattcctggcctgaagtaatctgcctgcctcagcctcccaaagtgctgggattataggagccaccacacctggcataactggtattttttatatgcttcctgggcaacttaaaaaattgattactctgttgtttcttcctttttttttttttttggctttgcaccaatttgtgagacccaagtatctcctacctagaaaaaaaacacactaaacagtaaatgattaccaacctatttggaacaaatctcaattaattaacatatacttcaaggagaagacttaacaaaatcttacttttcattcttaatagctctttccataaaaatgttccacaagtgtatcaaattagtcctaacaactactgttaagtgattaatgaaacaggagtgacaggagtgaatttaataatagcaataaatacagatgggactacataaattgtggaggtcctgatgcaaaactctctctgtattcgatggcatctcagctttctcatctgaaatgaatgaagaaattaataataatgatgctcatagcaataagaaaaaaattcaaaacaaaacccatactctctgacaacatgcctttgttcttattacctactacccacttcacatatgctagaagcgctaaacaaagctgcaaagagaaggcagtatggggatgaatgtggttcctggccttgttgtaaagcagtatggaccagtgacttcctccagagcatttgcattgtgtggcaataaaatgcagttgcacaaacattgggcaaactcacttaaagagggagcaggcttaggactaaaggtgttctctattctaggcaacttttcaacctgtcttcctctaaagtggaggcagattttcctccaccttctattctcctttgaaccccttccccttccagcacctcccatctctggagtttgtctagagtgatgcatatcactgctattcatctgcttatttaaaaagcactggtcccggcctagagtacttacagagctgtttcactgtgagggtctttatccttcatgcagagctaaaagcaaacatggcagtaaattagcctgctttttaaggcccatggagaaatattttgaatgcattaagatggctcgaggacaggtgtgtgtcctgtgcacacctctgcactggctcaggcgtcatttttggggccacactagtagtttttattaaactcaaagaagatgtaactcttagttaagatgcttccagtgtcttagatacttgagtatttacttttttatagaaaaaaaaatgcggccgagtgcagtggctcacacctgtaatcccagaactttgggaggccaaggcagatggatcatttgaggtcaggatttcaagaccagcctggccaacatggtgaaaccctgtctctactaaaaatacaaaaaaacagccaggcatggtgccacatgcctgtagtcccagttactctggaggctgaggcaggagaatggtgtgaacctgggaggtggagcttgcagtgagctgagatcacgccactgcactccagccagggtgacagagcaagaatccatctcaaaaaaaaaaaagaaaaaaatgctttgtggctgggtgtggtggctcatgcctgtaatcctagtgctttgggaggctgaggcaggcagatcacttgagctcaggagttcgagaccagcctgggcaacatggcaaaaccctgtctacaaaaaatacagaaattagccgggcacggtggtgcatgcctgtggtcccagctactagggaggctgaggtgggaggatcacttgagcccaggaggttgaggctacagtgagctgtgatcaaggcactgcactccagcctgggagagagagtaaaactctatctcaaaaaaataaaaaaagaaagaaaggaagacagaaagaaagaaagaaaagaaacaacaacaactaaaatatgcttgggattggaatagggggtggagtgaatttcttcttgagagacatggctgccctgttgctatgtgttccaaggagaatgccccttgctgaatgatgaactcagcctagggctttctgccttttttgctctcctttggcactgaattagctggcagagtcaaatgcatggcattaacctaagcatgcacgtattctgaatcataccaaccaacgaggataaccactttataattcaaacaccagtccactacagccagggcatgtggctatagtccagaagtgagcagccaatgccatcttttccatgcagatctctgaatctagagcggatgttcctccctatatttatttattataccacaggtatcatagcaacaataaagggcaatttaaaaggaggaaaatcagcccccaattgcctacccctggcaacacagctattttcaattcaggctttgcccatgtgcacttctcttctttgtaaatctgtactcataatgtacatataatttttattcccttgagcaactgtattttagatctcatggtataaagaccagatttgactttgccaagaagggttcctaactgaagtcacttatatttctagctttctgcctttattcagatgatggctttttacttaaatagctcagaatacttagataccttcattattttctttcttctagcaatcagtccaaagcacaatgtcagaaagatcacaacacatgcagcaataatgggctctattggtacacccacagttttatctgtaggaaatgcaaacacagggaataagaatgaacatttatatacttccaatacgtcccagcaatggtgccttgaactttatgtgtgtcatccccttaattaaaccttctcaacaatctcaaaaagtaggtatgattgtcctcatttcacaggtgaggaaccaggaggtttgaggggttagagtgcttgttcaaagtcatagaattaggccgggtgcagtggctcatgcctggaatcccagcactttggaaggttgaggcgggcagatcacttgacgtcaggagttcaagaccagcctggcccacatggtgaaaccccatctgtaaaaaaaaaagaaaaaaaaaaaaatatatatatatatatagctgggcatggtggcaagtgcctgtagtcccagctacttgggagactgaggcaggagaattgcttggtcccaggagacagaggttgcagtgagccagggtcgcgctactgcactccagtctgggtgacagagcaagactctctctgtctccaaaaaaaaaaaaaaaaaaaaaagtcacagaactggtaaatggtagaggcaggttttgaatcaattcctttgtggaataataatttattgtaatatgagtaactcccctaaaacaagtagaccattttgtgcttccttcacccacagtttttgccacacacagagcagaagtagattgaagtcaacgattttgcctggattttgaaaagtccaaaatatattgggaagtatcctggggtgggtgagggaagagagggaggaaggctttgagagcaagaagagaaagggtggagagctttctggactaagaaggagagagaggtctgtgggcctcaaaagcagtggggagccttgtacctgtactgcaatggtgccccaagcaggtgacaagacattatagaaggtaggtggctgcatagtgtctctagggaagtaggactctaagcatgagccttcccaaccttggcaaagttttctgcatctctctaaatgccatgcaaagagagagagcctacttctaacttggactaggaagagatcagcagcaaccatgacagcttggaagtgaaagcctacccctttattttctaaacaccaggtcaactgagagctatttttttttttttgagacggagttttgctcctgttgcccaggctggagtacggtggtgcaatctcggctcactgcaatctctgcctcccaggttcaagtaattctcctgcctcagcctcccgagtagctgcaattacaggcacgtgctaccataccgagataatttttgtatttttagtagagacggggtttcactgtgttagccaggatggtctcaatctcctgaccttgtgatccgccttccttggcctccctaagtgcttggattacaggtatgagccaccgcaccgggccaagagctactttatttatcagtcactataggcatagtgcctgtgtttgcaagctttctaagagcctttgaaaatatttgagacccagaaaaaaatgattggccccaagatatgaaaagaaagtagcaaaattaatcaaaattaatcaatgtttaagcatctgtaaaatgcaacctggcatcaactctaaccgaactgttaaataataatgtttaaacctcaagaaccaaatgagtaacttatttataacaaaattcaaaatctatacaagttataaaaattctttcaaaaattttatagcagaaagcacatacaatgtgctttgctttaatatctttgatatgatatggaatgaaactctcaaaagtaaaagtgaaagccaggcagcgtggcatatccgtagtcccagacacttgggaggctggggcaggaggattgcttaagcccaggagttcagggctatagcaccctatgattgcacctatcaatagccactgctctctaccctaggcaacatagtgagaccctttttttcttttttaagacagaatctcgctctgccgcccaggctggagtgcagtggcttgatctcggctcactgcaacctctgtctcctgggttcaagcgattctcctgtctcagcctcccaagtagctggtactacaggtgtacaccaccatgcccagataatttttgtattttaggtagagacagtgtttcgccatgttggccagtctggcctcgaactcctgacattaagtgatctgcctgccttggcctcctaaagtgctgggattataggtgtgagccaccatgcctggccaacccctttttttttttttttagagatggagcctgggtatgttgcccaggctggtcttgaactcctgaccacaagcaattctcctacctgggcctcccaaagtgttgcaattacaggcatcagccactgcacctggcaggaccccgtttcttaaaaaagtaacaaagtaaaagtgcttcagttcaacaaaggttttaaagtgaccttgtctaagcccctggattctgatgccatccaacgacgggaaggagcttcagtcatggcttaagtaacattttaggcatttaaaggaaattgagcatgtgctatttatcgcacaattgagtttatggattgaggtgcagtcaacaaatatttactgagtgactaatgtgtgttatgcactgtgttcagcactgcaaaaaataggacaggtgtagaaggctcctctgccttcgtggagctcatcttctagtgagggagacagacattaaacaaacagacactacagattaagtattagaaaggaaacagggtcatgagttagcaagtgaagggcaaaaaccagggaagaggggaagaagtgactttaggtaaatttaatttcaaagcccaatccctatataccttaagattatgaaatagggtttatctcccctgtccccataactgtataacacactaaccagttattattataattatttttggagacagggtctcactctgtcactcagactggagtgcagtggcatgatcatggctcactgcagcgtcgacctctagggcttaagagatcctcctacttcagcctcctgagtagtcaagactaccagtgcgtgccaccacacccagttaattttttgatttgatgtagagacagggttccaatatgttgcccaggctgttttggaactcctgggctcaagcaaccctcccgctcggtctcccaaagtcctgggattacaagcatgaaccatcccacccagcctgtaactacctttttatcatttcctgctctggataattttgggaaataaatggattaaatttttgccctctcttagctgtttctaaaaattattctcatgaaggtatgggtcatatcacccctatggagaaactttgctcagggagcctttttctagtaagccctggttctgtactagccagctctgggacacaccaaaggcccgtcaaccttactggggagcccctctatttgcaagatatcaaaacaaaggggaagtaaaggtgggacaataagaaaaagaaatcagaattcagtcacaggttggaatatttttaccaagccagataaaatgaagccacatgtgacagctcttactctatttttttatttttatttatttattttttgagacagagtttcactcttgttgcccaggctggagcgcagtggtgcgatctcggctcactgcaacctctgccttctggtttcaagcaattctcctgcctcagcctcccaggtagctgggattacaggtggctaccatcatgcccggctaattttttttgtatttttagtagagacgggtttcaccatattggtcaggctggtctcaaaccgctgacctcctgatccacccgcctcggcctcccaaaatgctgggattacaggcgtgagccgctgcacctggctgacagctcttattctatacacaaaccgaagtaaactaccttacccattggcttgctttggattccaaatttctgttgaaagtgactttggtcggggcatggtggttcatgcctgtaaccccagcactttgggaagctgaggtggcagattgcttgagcccaggaattcaagaccagcctgatccacatggcaagacctcctctctacaaaaacaatttttttgattagctggttctgatggcacgcacctgtcccagctattcaggaggctgaagtggaaagatcgcttgagcctggggggatgaggctgcagtgaactatgattacgctactgcactccagcctgggtggcagagcgagaccctgtctccaaaaaaataaaagaaaaagaaagaaaaaagagactttggcaagggtaattacataactgcccctctccccttgtcctgttttatggtctcatttgtaaccagacctgatatttccctcctatattcatcatggttaaataatcccaacacatgggctaaatcttgtgctcaagaaaagatctgtgatgtcgtttgtagctttgcatggcctcatttaggtacttcctcactgagccgtgaagccaggtgagggctcatgaaaatcttggcatttagcccaagccccagcagcagagcatttatgccaccagccgtgggaagtagctaagcaagaagaaataagaaaaacaagttggtttggaagagccccacccaaaacaagtttctgcccacctgaaagccaatttgctaagctagcatcctgattgccacataagctgtacttttttttaatgtgacacagagcaattatgatttcttcttaaccaggagggatataattccctggcctgcaagtgtggtgttcatagtcaggatggcagggcatgaggcccacccttccatgcttttgtggtcttgggggaggtaaataaccacaaagctttttcactgcttctatctcatgggtattcaggatatttgtgggtttggtttttaaaacaagtagcccctgagcaattgttagtgctccgcaggacgaattactgatcattccaggaatcacagtgatgggcattcaaccaccagtaagtcttcttccccactagccactcttttcatatcccataactcttcccctcaaggggaagcaaataagatgtcctatggttacatcaccacaacacttctggcaggggttcagctggcttcctggtgactgacaagactggcaataagtgagtacagggaggcaaatgacaaagtgagtaatgttctaacaagatatgggagtctcagcttgttgggctgctcctggtgtgctagcatgagagcagaccatgtgtgaatgagcatttttggcatctgctaccccaggtattttgcctttctctttttgtatgagcaagaaatatgaggagggaaaaccccacagagcatcatttgttctgtcattgtagaggtgataaccctgggtagatgaagcatgaatccaagagaaagggcttttttgtccccttattttttcctactctctctgctgattaccctacaggttagaatttgagttaggagtgattgtagggatccattttcttatctagtcctaatttctcttctctgtgtgttttttacttctgttagttatgaagctgtgaactcaaaagtccagttgctacacacattgttgcccaggagaattcatggaaatactcttccctaaaagccaagcaggattgtttcctatatttggttctaagaaaggattcttgctcaaaaaacagtgtcctgtatggaatgggcatgatttccctgaaaggatggactaggattcttagtggaaaaatccttggatggggatgattctccaaagaaaatcctggccctaatcataaccgttattatcatttattgtcaccagaaatattcactgagcatctggtgtgagttttgcactgtgctgggtattacttaaaaagagcattacctttaacaatcaggtgaaagtccaagctctccgttttcagagatgactttgcaatacaactgtaggttccgttgtcaggcttctcgactttggtgattgacagctgaaaagactcacttgtctgttggatttggtgacggcttttctctaaatcgaggagactactgtttttgtaccacatcatttgagcctgggggttggctttcacattgcaaaccaacttcacattactgccttcctcaactgtttggaagtcgtttccacttaggagaggaggaactgcaagactcaagcatttagatttaattagcagataagcaatagttcactgtcagagttcaaagtcttccttcaatctatctcatgtggtcatttattcatttgacaaaaatttattaaatacgtacggtgtgacaagcactggggtaacaagggcaaataacacttccagttccaaatctcatagaacttttaatgtgatgaagaagacaaaccatgaaacaatatatgattatgagcatgatatatatagtaatgatctatgacaagcagacaatttgtaacactacccaagagtataagccttgagtctttcttctctgagaattaataaaccaacctgtgctagtgttgcacaaaacagtacaaaattaagaagacatacattgcaattagatctaattccatctacaccgtttactgtgactttgagacagttaactaactgctaaggcctctgtttctcatgtaaaaaaaaaatgggataatcatacatctcctgagatgctgtaaagattaaataaaataatccctgtaaagaatttgccacagtgctagccgctattattattacggtggtggtggttttgagggttactctcaccgtctgtttttgcattttatcgaaccattgccttggtaacatattcaccaatgcatctttgcgttttctcagtggtgctctagaaataatgtcctcctcccagaaggtgttctaagcatgagaactctggcatctgtggaaggcaagtgagtccctctcatccctgtgtgtgagcaactccttttttcctctacaataagggcagttgtagacccatagacagtcaacacatctatcactgtgcatattctggcagaagtgcagaatagtaatgaaatggttggagagtgggaactaggaaaaagatagagacggagaaggaggaaaaaggagcttgtataatctgcacactgaataattagaccctgagtaggctgtgttattaataactctctcagaagaatgacattttgttgctctttggaatgagctcgaattctgtatcatatccaacaaggatgttatatggtattcagataggaaggaagctgctggaatagagaacataattgccaaatggaacaattccatttgtggacagattctgttagtgatttctttctatttaactatttgaaattaatttaagcatatcagtatatgtgaatatcccctctgtaaaaattagtacattttagataaagctaagatccaagctggtcacttcctgatccccagagatacccactgttatgagtttggtgtaaatccttccctatctttcttttttcttaaatagttttctatacatatagtgtacccataggaaatatatcatattattttagggacatgggaaggttttacataaaatacttcctttctctcagtaacttgcatgtttttgagatatgtttatattgaaccacagagatctagcttattgcttttagaatgctatagtataatgtatgcctttaatcatttgtgttttgatgggctttaggttgttttcattttaaaatgttaaacaatgctacaataaacatccttgtacatatctctttatgatcctgtacatgtatttctccaacgttaacatctagaaggagaaatggtgtgtcgtaagatatgcacactttaaattttgataagtattttgaaagaggtgttctcaatttaaactttcagcaacgaggtatgagaggacctgtttctccacattctcccccaaacagtgtattatcaagcttccatttagttcttgattctgctatttataacaataatggtcctgcctttgaagggtacataatatccttgtcacattttatgagctcattttgatttattggttgatgactttgtgtcagtactgtcattatggattactgagcaattaactatacacacacacacacacacacacacacacacacacttagcaacaatgatatttaggagattgttataaacagaatttaaacagtggattgaggctagaaaactgaaaacaatttctttaagtcatcaaatcacattgttggcatttctgccatgtctcccttaagagggttccatcagcctgggcaacatagcaaaaccccgtctctacaaaaaatacaaaaatcagctcggcctggtggtgcacgcctgtagtcccagctacttggaaggctgaggcaggcagatcacttgagcctgggaggcagaggttatagtgagctgagattgtgccactgcactccagtgtaggtgacagagtgagaccctgtctcaaaaaaaaaaaaagtttcgtggaataagcacttaagcactaggttagaagcttgggaattagtgttttattctcagctgcacctatgatttgagcccctagtccgggccttagtttccttagctggctttttattttattttattttattttattttttttgagacagggtctcactctgttgcccaggttgaaatgcagtggcgcaatcacagctcgctgaagcctcaaacttctgggctcagaagatcctgtagcctcagcctcccgagcagctggggctacagatgtgtgccaccatgcccagctaattaaaaacacaccttatttttttttttggtagaaatagggtctcactatgttatgtttgtagagatagggtctttctaccaaatcatactgcatcattatacctcacccattgccataccatccacaccattctcatgcagaaccagcttttcacccaacaacccatgtgatcatctacattgtatcacttgacagtcccctaagcctatacagttctaccaatgggttaccaatacctggaacccaatcattgaaaagcttcaccttttttgattttaaggtgatgtttaaagattccctaatgaaaatcttttttttttttttttgagatgggtctcacactgttgcccaggctggagtgcagtggtggcatctcagctcattgcaacctctgcttcttgagttcaagcaattctcctgcctcagcctcctgagtagctgagattacaggtgcctaccaccgcacctggccaatttttgtatttttagtagaggccaggtttcaccattgttggtcaggctggtctcgaactcctgatcttaagtgatccatttgcctctgcctcccaaagtgttgggattacacacatgagccactgtgccaggccatgaaaatctgtctaagcagaacacaaaagctaggaactacaaaggaaaagacttgaagctttaaatatataaacatttaaaatttcaatatggcaaaaaagaacaataaaaattttcaaaaacaaataggagaaatacttacaattcaaaatgacaaaggactaatttccttaatctacaaagcccttgtacagattaatgagaaaaaagcataaaacccaacggaaaaaaatgagttaaggatacaagcaggcatttcatggaaacaaacaaaaaaaagaccattatgtttacacaaaggtgaacaccctcattcttaatttaaaaaatgaaaacaggctgggtgcagtggctcacacctgtaatcccagcagtttgagaggctgaggtaggcggttcactcgaggttaggagcttgagaccagcctggccaacatggtgaaccccccgtctctactaaaaatacaaaaattaaaaattagctgggcatggtagtgggcacctgcagtcccagctacccaggaggctgaggcaggagaatcgcttgaacccgggaggtggaggttgcagtgagccgagattgcgccactgaactgcactccagcctgggcaacagagcgagactctgtctcaaaaaaaaaaaaaagaaagaaagaaaaaagaaaaagaaaaaagaaaagaaaagagaaaagaaaaaaaagaaaaggaaaagaaaatttcaaaggaggctggcaaattctcagagtttggcgatactcagtgctcatgagggtgaggggaaataggtactctcatactttgtggtaggagcataaattgggcaatttggcaataccaagacctagatttcaactaccacttcatgtgttacagacattacagacccactagctgtttcttttcccctcactcacaagtaacattcagcaccaccgaaacggacacggactgatccctccccagcctgcaggtaaagctgattccgttgtcattttcactgatggaagagacacagacagagctggaattgattttgtttccagatttcaaatccactctcccctcctctcggtaccagagcagttcttcctctctggtgtggttttgaacagcacatatcagagatgcttgggagccaggtgtagtatccaggatatagttctcagttttaccattcacagttaaaacagaacctgggagtatagggagaaactatttagatatacagagtaaacaaccttaatgctcatgaacaggggattggttaaataagttatgttacatcagtagaacaaaataaactctcaacgattaaaaatagtcatattgatctatatgattttataatgaaaaatattcataatgtattgttaactgaaaaagaaaaagattaaaatgtggtcatcaaatttttgtgcacattggaatcaccaggggatcttttaaaaagtactgatgtagctgggtgctgtgcctataatcccagggctttgggaggtagaggcgggaggatcgcttgagctcaggagttcaagatcagcctgggtaacatagtgagactccgtctctacaaaaaataaaaaaataaaaaaaaaaacattagccaggcatggtggtgtgcacccatacttttagctacttgggaggataaggtgggagactcgcttgagcccaggaggtggaggttgcagtgagccaagatcgcaccattgaactccagtctgggtgatagagcaagaccttgcccccaaaaaaaagtactgatgcctgattctcatccccagacatctgattagttgacatgagtgcaatctgggcattgtgttgtttaaaggcaccccaccccccgacccccggtgatttgagaagcatcaggttagaaatcaatacatacagaatgatcatacacatatgtgtgtatgtgtgtatacatggaagtattttttcatggaaaaaagacaggaaaaaacccatatatattgaatacacacacacgcatgcatatatgtatatacatatacacataccatatttaatttgtttacttgaagggattgaaagtgggaaagcaagggaatgaaatggaaaaatatttaaggtataaactttaggcaaaaaggcagaatataaattaaagctctaataattactacaaatgtatcaaaattgcacatgcagatgagtaagaactgatttgaaaacattttctgcttaaatgataggattatggacaaattgggtcttgcatctataatgttttaatattgttttggcagtgaagaaaaataaaaagatgtttaagtagttgaggtttgtgtggtagaccagtctttgtgggttgggtgatcaggatacataccaggttttttttgttttgttttgtttttcagctctgacttttagaaacctattcattgcatagtaatacacctgaatttcggtttttatttttctgattcagaagcaagtaacaaaagctaaaaaagaactttatctgtcataaacctgtaccccagataacatttgttaatatgttctgtaaacacattaaccttccttttaaaacacttaagctggccgggcatggtggctcatgcctgtaatcccacactttgggaggctgaggcggacggatcacctgaggtcaaaagtttgagaccagcctggccaacatagtgaaaccctgtctctactaaaaatacaaaaaaattagccaggcatggtggcgggctcctgtaatcccagctactcgggaggctgaggcaggagaatcacttgaacctgggagatgaaggttgcagtgagccaagatcacaccactgcactccagcctgggcaacaaagtgagacttcttctcaaaaaagcaaaaaacttaagctacttgtaaagataatggtattgttgtctagtattttattaaaatatggaatattgagtggttgtcatctctggatgaaagtatttggggggatttgtacttttctttttttttttatagattgcctgatttattttacaatgactatgcattacttttaaaatcagaaaagagtggtaggagagcaaatgctggaaagattttcatgtgaaatggtatgttcagataaacagatgattatttggggtaacattagtaataaaatgcattaaaatgtaggaggattctggtggtggctctggagagaatagaatacttcaccttgtcttgtaataataaaaccctaaaaacaatatttttccatttgatttttttttttttttttttgagacggagtctcgccctgtcgcccaggctggagtacagtgacgtaatctcggctcactcactgcaagctccacctcctgggttcacgccattctcctgcctcagccacccgagtagctggaactacaggcgcctgccagcacaccaggctaattttttgtatttttagtagagatggggtttcaccgtgttagccaggatggtctcgatctcctgacctcatgattcacctgcctcggcctcccaaagtgttgggattacaggcgtgagccacccgcctggcctccatttgattttttattgttagttgactcctgtactgtgagccatgctaactgtgtagtcattccaatttggaatttaaggatatatccaatgcccattgatcacttttcttaatcggaaatttttctttatctaaaaagaggccaaaaagaactttaacttacttgtcatctcacgtggcagaaataaaattactaagagaagaaatcttcccatttgcattatgacactgctcttccatgccatctttaatgagttaaactcagatctactaagggaaaaatagtgcagttggttttgtactttggtctgcaatgagttcgtgaaccttccttctgtctattatgcatttaaagtgaagtcccagatgaatcatcccagctataacggtactacttctagcttttaattaaacaaccctgtctgactaagttcaaagtacatttagtagtaagaaattttttttaaaagcaacataaaaccacaggaaataggctatgacagatagagcagcgtcagggtgccctggggaagatgaaaccagtcttccctagagaaactgatagaatttcattttagcagaatgaaacttgtctcattctcagacagtccctactgaacaaagtaattcttgttctgaaagtttttcttgggtcatttttgtaaagatgttctctgataatagagagtttttgagactactccaaatcccatagattcaaatggtgtgtacgtagaaaagcctcaattgaaacatggcctctagtttaaaccatgttaatcttgtctttctcccactattctctctctctcttccccttgacccaatggactaaaaataataaataataaaggtgtcctttctcccttcttgcttttgcttcaactctccctctccctaagatattctccatttccatctgggaaaaaaacatatattcattacttcctttcaagagtactactataaatatagcgaaccacatacggaaaactttctgcgcaacagggactgtgctaaacactttacatacatcatttcagtcacaattaagcctcctaacaaccctcctgaggtcgtttctatagatttaaagagactatgtaatttgcctgagatcccacagacagtaaatgtcaaggtcgggatttgaacccagactcccaagaccatgctcttaaccaccctactctcaaccaccctactacccaatctactgcctagattaatattcttttcctttaagaagctgctgttaggctgggtgcagtggctcatgcctgtaatcccagcactttaggagctgaggcaggtggattacctgaggtcaggagtttgagactagcctgaccaacatagtgaaaccccatctctactaaaaatgcaaaaaaaaaaaaaaaaaattagccaggcatggtggcgagcgcctgtaatcccagctactcgggaggctgaggcaggagaattgcttgaacctgggaggtggaggttgcagtgagccaagattatgccactgcactccagcctgggcgacagagtgaggctcggtctcaaaaaataaaaataaaaaataaaaaaataaaaaaaagctgctgttaatcttttccagtccctggccactgggagttctctccccttaacaccagtattaatttacaagagctgaaatatacctatacctactctactcctcccctgtcccaggcgtgccctgacaggagtaagtttcattcatgccaggctcaccctttctggcagacaagcctgcatcaatcttttcgtaagatgcaattactactaatattgattcttttgtaattttaaatatttgccaaaaagatttctatcacagtgttgtaacagtgattactgcagaatgtggtcaatagtagagttttctcaagcgctctgcactacaagtactcaataaaaactgagagtgcaggcttcttgccagacctcacccagccctattaaggggacaaatctatgtcttctctttccctccactccaccgagacagcaacttttcaaaatgtattcccctcacttggcttgtttttaatctgtatgactctctactttctatataagacagtcttaccacttacctcttgagctctgagaagctgacttccttggccaactgttcctctgcctgaaaaccctaaatgctttccctgttacaatcctttataatacttgaatttgaacgctttatgacagcagggtcaaataaataagataacttgggttcaaagtctgtttttctttatggagtcttagagaagatagtaattgggaaagacatcttcttaagatctaagtttctatgtctacctcggttactaggtggggccggatattactaacagggatgtgttgttccaagaaagcttgaacttgtgcaaaaatctgtagcgcatctcactgaatattgtcatatttaagtaagatggctgcgttttgatcatctagcctggggattgtgaagggacgagtccaaagagaagtttgactttaacagaggtcaaaacattggaagattctacacaacttaaataatgctggaaaagtcttagttaccactagtaacccaagcccagtgcataagctgtaccaagccaggcatggcagggagccgtttttttgttgttgttgtttgttttgttttttgaggcagggtttcactctgtcacccagattggaatgcaatggcacaattgtggctgactgaacctctgctcccagcctcccaaggagctaggactactggcgtgagtcaccatgcccagctaaactttgttaatatatatatttttggtagagatgaaatttcgccatgtttcctaggctggtctctaactcccggccttaagcaatctgcccaccttggcctagggaacagttttatcctcttgaggctctcacctgattgggagatccttgcattacactatgtttatggtattgttaacgatgcaaattttatctgccaagtactattgttcccatttacacaaaaatataacagaagaatatttatagttatctacacattttaacacactgctgaagcacaccagcaatctgcctcttactagctatgtaactttgaaaagttatttaacctccatgagcctcaggatcttcatcaatacaatggaaatagtaatagtaccctccctacggagtcactgtgaggattaaatgaaatgaagcatgtgaatctgccgcacagtaagctcttggtaaacagtagctcttattactattattattaatataggctgagcagggcatcctaaatcaacacaacctcactatagcattgttcaagcaaaaatcagagctaagagcagctcctgttggctgggttgcaagcaccacccaaacaggttttgagtttgcctctccagggatccaagattgtcattttaaaatgaatttagcaatggagtgatgttttggttcttggtgcctccaaaatagaccctgagacagagctttgagtgccaatagtttatttaaaggtgatctcggccgggcacggtgagtggctcactcccttaatcccagcactttgggaggccgaggagggtggatcatttgaggtcaggagttcgagaccagcctggccaatgtgatgaaaccccgtctctactaaaaatagaaaaattagccaggcatggtggcgggcgcctgtaatcccagctacttgggaggctgaggtggaagaatcccttgaggctgggaggtggaggttgtgttgagccaagattggaccactgcattccaatctgggcgagagagtgagacccttcctcaaaaaaaaaaaaaaaaaaaagtgatctcaggaagcatagtaaggaagtaagatagggaagggaggaaactagtaaagaatgtgttaaagattactaccgtgagcaactatatccctggagctttggacaagttgtattctgtgcagcatacctcagaatcaactactgatagggaaggaagcaacttctctccatctccggctgagggacactctcaaggtgttgactctctggcactttcagcctgccctgtgagggcaaagtgtactctctcaagctggccaacatgtccaggaaaagatgctcaggaagtcactggctatatgggaactctttgcaggtaacttctgggtaggccaaggatgtgtgagtagagcaccaccagcaacttctacaattggatattaggtgatattaggaaataatgattaattattattagttgtgatcatggtattgcagttatgtagagaatgttctaattctcaagggatgcctgctgaaatatttatgggtcaagtgtcatgataattgcaactacctttcaaatgattcagcaagaaaagtaaacacataaacacacagcaaatatagcaaatgttaacatttattcaactaaataggggtctatagatcttcattgtactattgtttcaacttttctgtatgacatttttgtcatcagaatgttggggaaatgtattcagcagatatttattgagtatctaccatgtgctaagtattctaagtattgaggatgccagttgcagccaagccaatatggtggctttgtcatgaattagggaaaatatggcttctctagtcactctactgccatctgtggaaaattgttataataactctacaaagctatgatgtctataagatgaatgatgcttccagcttaatgcttccaccacttaatgcttccataacattaagtggtgatacatagatgaataaaacaagctctgcgcttttgaaggtcttacatcgtagagcagaacgttaatgatgatcaggagccatgcagagtggcctcaggtgctgagcagggacttcagataagaaaaatggtataatggcgcccctgctggagagtcaaagaattttgtcatatgactcgtgcaaggtcatataaatccctggaacagtcctctttcctagaactgacagaggggagaaatcatttttctgtaagtagttaagcccagtagttaaccattaagcctaagtagtttggctgtttggagtatttacagagtccaatactccacagcttccacagtggcttagaccaagagggaaagaggaaaaagcaccctcgagtctgaacattcctgggaataaagaccaatctggcagggtgcagtggctcatgcctctaatctcaacactttgaaagctgaggcgggtggattgcttgagcccaggagttcgagatcagcctgggcagcatgacgaaacttcatctctacaaaaaatacaaaaaaaaaattacaaaaattagccaggcatagtggcatgtagtcccagctacttgggaggctgaggtgggaagatggattgagcccaggaggttaaggctgcagtgagcgtgatcgcaccactgcagtccagcctgggtgaaagagcaagaccctgtctcaaaaaaataaaaaattaaaaaaagacaatctgcttcccattcctaaggcccaggtacttctagaagggtaacagacaagggagtccatgactttctgattaaggcaagtattagaatcacctgggggaggttccagtacctttccttcctcagtcctgataagacttagaaatttcatctttaacaagccttccaagggactctacacaatggtttgtgaatctccttttgagaaccatggagtcaaattcaaggtgcaaattgggtgctctgccctggaaggggatgcgtgcacagggctgccttatgggaggctggctgggtgggtacacaggcctcacagtactttctctggtatgggaatgaagaacaggagagagaaacaaccaaccagaatgtgggaaaggcctgcagggcagggcagtgatcactgagcactgccatcccacagcctttgagctgtgaccaaacttggtatgacagagacagcaactcaggaaatggctagagggccccagggccagcagggtcatctggccaggtcactgggaatgccactgatagttttaaagtgacagaaaaactagaaatttggcaggcatagcctagcaatgatagagtggttctttttctcttttttttttttttgagatggagtttcgctctgttgcccaggctgaagtgcagtggtgtgatctcggctcactgcaacctctgcctcctgggttcaaaccattctctacctcagcctcccaagtagctgggattacagacgcccaccaccacgcctggctaatttttgtatttttagtagagatggggtttcaccaccttggccaggctggtcttgagctcctgaccttgtgatccacccgcctcccaaagtgctgggattacaggcatgagccactgcgcccggccaatagagtggttctttagcaacacagggacccagtgtgtagctgctgctgctgctgctgcttcttcttgtcgttgtcgtcttcttcttcttcttcttcttcttcttcttcttcttcttcttcttcttcttcttcttcttcttttcttcttctccttctccttctcctccttctccttctccttcttcttcttcttcttcttcctcttcttcttcttcttcctcttcttcttcttcttcctcttcttttttttttgagacagagtcttactccatcacccaggctggagtgcaatggtgcaatctcagcccactgcaacatctgcctcccgggttcaagtgattctccttcctcagtctcctgagtaactgggattacaggtgtgcaccaccatgcccagctaatttttgtatttttggtagagacaaggtttctccagcccaggctggtcttgaactcctgatctcaagtgatcctccctcctcagcctcccaaattactaggctcacaagtgtgagccaccgcacctggcctggtcgtagcttaaacgacaatcagtgattctccaacctctcattcccctttattaggattcctccatcaccagaaatcttaaaccttaaagcaatacctgaagggctatctgaatagggttgccagatttaacaaataaaaatacggggcactcaggtgaatttgaatttctagtaaataactaacaaatatctttttagtgtaagtatgtcctaggtaactactatgtgctaattcatcacaagcaaatattttaagactcatttgttaaaacatcattgtttctctggaattcaaatttaacaaggcatcctgtcttttatctggcagttctccatctgtcttctcccttttttagtacatgaagaaatgaggttcagggaagtaaagggacttgtccaaagtaacacagctatttagtggcagagcatggattggaattctttcaagacgcttggctgccacatggcatctttttccaagtgtctaacttcagaattttaaaatttggcttcttgaactactatggatgagctttagagtgtcaatgaaaccgctgaaattgtaggcaaaactgtatgtgtgtgtgtgtgtgtgtgtgtgtgtgtgtgcatatgtgtatttttctggggagatggtctcccatcttagcctgagtggactaagacatcatcctatgctctgcaacctacctatatcaaaaacaaaaactcctctgagctaccctatatcctcctttcttctttgccctccatgaatttttcatttgaagggaggagtcggagaactaaatttatttatttatttatgtatttatttttgagatggagtcttgctctgtcacgcaggctggggtgcagtgtggtgcgatctcggctcactgcaacctgtgcctcccaggttcaagtgattctcctgcctcagcctcccgagtagctgggattacaggtgcacgccaccacgcctggataacttttgtatttttagtagagacggggtttcgccatgttggccagactggtctcgaactcctgacttcagatgatccacccacctcggcctcccaaagtgctgggattacaggcgtgagtcaccacgcccagccaggagaaccaactttaaacagatacttattatacgcttagccctttacacatgttctaccattcaaccctcacatccacctagaaagtgcctatgatgatccccattttacaggtgaggaaaccaaggtgtagccagctctcagggttaagatgataaaactaataaaagagtaacccaagtgaaaatgctcccacaaccaatgccctttcccccaaagcttcctgcctccagactgacagcaagcaagaaactatctgtcggtgtttaattcctccgcttcctccacctattgggactgacccagagttgacagcggaaacacctacacaataataggtagaaggtagcagagatgtgacttttgcagttgaccactagaggtcccttttcatacacagtgattttgaagttagcctgctaggggttagacaagatatttccttggagcaggtctctgtctgttacagacttcactggtctatctcataccaggcagtccgggagtggccgtgtgacacagcaggagcaatacagaataaaatggctccctcagaagaaggcgggtgatgtcctccaggatcagtcttgaagacagggttttcaagtgggaacacagcagggttctaaagcttcctcttcatctaaaaggaagaacacacaggacattccaccacccaccgtcatcaggcaaacatccaatttcctttggagtgtagtctggctccaggggcatatttactggaagctaatgaagcttcggcttcagggaccctcatttgcataggcctgttctaaaggccctgaccttagtcactttatatttgtagttttgtatttttttttccttaaaggaattcccctccaccaccaccaccaccatcaactgtaaaaacatcaggccgcatagggcttggatctagtcctctctggctctagtttacaggatttcagagaagagaaaagagaatggggagagtttcaaagggaagcccccctcgaaactaataagaggggatttcctgtgggatgagaaaaagctccgtacgtgggccaaagaacaaggtagtcacttgatctccaaagagctggaattgtgggggcaccagacgtgaaggagccccctcttcttgcctgctgggagctttcctgagccagcaggaatttgccaaatctttagaagcagggtggttcactgacagctctgtagcatcctgttcactgctttctgaataaacaaatggtcttgccaacaattgtgtagattttgaggggggaaaccacactatagttcccgaattttttttttttttttttttgagacagagtctgctttgaagtgcagtggtgtgatcttggctcactgcagcctccacctcccaggttcaagggattcttgtgcctcagcctcctgagtagctgggattacaggcacaagtcaccatgcccagctaatttttgtatttttagtagatatggggtttcaccatattgcccaggctgttctcgaactcctggcctcaggtgatccacccaccttggcctctcaaagtgcaaggattacaggtgtgagccaccacacccggcctagttccagaatttctatgagttgtgatgagctacgaactttacaaaggagtaaataaccaaggtggaaataacaattctgtttgggagatatgaatggattctggaataaaagcaaaagcaatatccacacctttagaagcagatgcatggaaggagctgggaggttttccatttctgaaagagggcagtgctggaaacttgcaaccagcaatcttctggaactggcttgcatcgactggtgggagctgactctgtgtctcttcccagctctgcactcagtgacttcaacttgatagcttgaaatcagccacagtgggagtatttacaccactgaaattggcaattggtaaaaatcagggctctccgcactgctggttgttaaccctttactagcacatcattgcctgaacctcaccgctaacatacacacacacacacatgcacacacacacacgcacacagcacagaacctgcaagcactcctcctgcatatttatgtgtatgcataaacacaaaaagaatcacatatgtacactttccctttatagccagcttggatctccctgctctgtcgtgctgacagctttagtgttttcctactatttacatcctgatctcagacagtgatctctctctttcttgaattcataattgttctttcccttacatcatgagaccctcagtgtttcagggatgaagtacctaattgtgaaaccttctgaggcaataagagtcaggccagcagattaccctatatatccccaagtgaacagcaaagacaataatacaacaattgaatggtctcctccaaatggaaaccatgttaagatgtggccagtgttctctcaagaagttcaaaggcctccctgagttctcaccaacctacacctgttcctctggcatatggagaaacttgagatgagcatctttgtgtcagatggacagaaacaggtcccaaaaagtcatgtgacttgctgaggccagacccaacaatggatgtcacttctcagcctgaaaaccttgagctgcaaaatatgaaatgagaaacgtcagggagggactgacgtttgtgtgtctacttcagtctttagtctttttttttttttttttttttgagatggagtctcactctgtcacctaggctggagtacaatggcacgatctcagctcactgcaacctccacctcccaggttcaagcaattctgatacctctgcctcccgagtaactgggattacaggtgcacaccaccacgcccggctaatttttgtatttttggtagagatgggatttcaccatgttggccaggctggtctctaactcctgacctcaagcgattctcctgccttggcctcccaaagtgcctggattacaagtgtgagccactgcgcccagcctatgaatagtctttgagcgagagattattatccccaatttccaggggaaagaactaaagccaagggaatttccataatctatttaaggatatacagctagtaggtagtagaatatcttgttaataatttaaatcaaattaaaaaaatcaaatagaataacagggcttgttgggaaaaacaattctttgccctgtttctctctccctcttccttcccctaagtttgctccccaagacaattattttaagacttttaactagttcttctgttagtcaccttaatactgttatatttcactaatcagcttattactagaataaggagtgcagcaactttgttttgtttattttatggctatatcctcaatgtctagaacagtgcttggcacatcataaatatttgtttttaaagaaaactcatcatttctttttttctttttttgagacagagtctcgctctgtcacccaggctggagtacagtggcgcaatcttgactcactgcaatgtctgccttccaggttgagtgtttctcatgcctcagcctcccaagtacctgggattacaggtgcatgccaccacacccaactacttttttatatttttagtagagatgtggttttgccatgttggccaggctggtctcaaactcctggctccaagtgatctgcccacctcagcctcccaaagtactgggattacaggcatgagccaccgtgccctgcctgtataccatcacttattgatttattaattgacctcctgctatgaaagatgaggatctagtaccctaacattttccttttacctccccaactgctttccattaaggttttatcagtattttaaattcctcagctacacctttgtaactataagtaacacacatacacctttgttttctgttccacaactacagatatctttggacttcagtgtgcaagtcttgacttcattacagggatgtctaacttgagggtccacgaccttccactccatactgatcctcccacactgaccatttctgggccagtgggtgcccttctgcctaatattgggaaatacggattttgaactagaagcattcttgggcctgcatctactaaaggaaattagactgaagttaatggagcgagtcctagctagtgtgacaaattaaagctaaatttagttcagaagcgtttgaaaaaatatccacagtccagattttttgctgacaatttcttgttctctaaggtgaattcctgccctttccacaaggcagggaatatattttacaataggaatactttgggtctaagaaattggtggatacccttggttctccactgctataattggctcaaaataccttggaaatgcccctatgggtgccctgaggcaagtgattttcttggcatgctatgaaaaggagagtgggagctgagcacagccctggtgtaagcctgggtatgggtttcactagataaagtcactgacaccacggagcagaggcagtgaaagaaaacagtcatggcctttgttttcccagggcctctggctggcattgcacacacaacgcaaacactgtccacgttggtgctttatacagattttttttaaggccagtcaagtgaatcaatgggaatagggaaggaacaaagaaatctgtaactggtagtgatcgattcgttgtaaacaccactgcacttgcaccagcctatatagatttttttatttgtgtccattgcctgcctactttcagaactcgtttgtcttttatctgcacttcctcatccctggccactcctactccttgtttttaaagctacctgctggatctgcagatctcagttagacagggacttaatgtacaggtcttgtaactgtcaggcctttggacttaggcagcacccagggcagatggcaggagaacttagatcagggccccacagcctcttgctcgtcctgttacctgaagaggaaccagaggactagcccctgccccactccagggccaaccctgtggttcagcgggagcatacagctgtctgcaaattgcaacatactctggacacagtccatcaacacatcctggtccttacccattatcagtggaaacctggcaatgtttgcataacttttgtcctacacttagagacaatacgtcctccactagaagcagcatctaggaggaagtagtggggcagctcaggacacagcaagactagatttgaattgcataagtttaggatttggacttgaacaaagccacatcattaggtaggattacattcagttaggcatagtagaaaaatgtagaaatggcttaaacaaaaatgagaatgtattttctctcttatacttaagaagtccagagatagtcagcccaggactggtatggcaacatttgtccctaccatggaaggaagaacaagcttacagccatgccagctgaaaaaggccgggggaaacccaccagctctgtaatagacgtgtacctgaggacaccagccttttaagtcacaatccagcttacttaggccctgtacccatctcttttatttattttttttaatttttaactttttaaagacaggatctcactctgtcacccaggatggagtacagtgtgtgatcatagctaattgcagccttcaattcctagctgtgagtcatcctcctgcctcagcctcccaaagtgccgggattacaggcatgagccatggagcccagcccttgcacttatcacctaacccctaacatggctggtcaagttctgcctactggatcactgaacactgaggatgcaggccatgctggacggaggggcctttgaaagcttcgctgactaagacctgttgtatcttagctcacctggttcacagaagtatatggatactgtgtgaggcagactctgagagagccccaatgatccttgcttcctaatattcatgccctagaggtaaactcctccccttatatgtgggctggacctagtgactcatttctgacaaatagaatggggcagaagtgatgggctatcagttctgatatgaggttacaaggctgtgttttctcttgctctctggcacacttgctctgggagaagtcagctgccatgttgtgaggctaacttggcaaggaacggacttctccagacaacattgaggaaagacagcagatggccacctgagtgagctggaaatggatcttcctcctatcaagcctgaaatgatgcagcttcagctgatggcttgatcacaacctcatgaggaatcctgagccagagtcacccgactaataactggcacccagattccaaacccacaaaaaccatgagatgataaaagtttgctttaagcggctaagttttgggatactctgttatgcagcaatacgtaactaatacaggtttatatcttctttaaaaaactctgctagtttattctcattcttgacttttaaaattcattgctcaatcagtcctgaagtaataggttcaggtcatgcaggaatgtgactacagagctgagataactcatgtgaaagtagagaaacatgtttacaagcatcatgagcgtctacaaagaaatactataaatcacttcctttattgaaaaaatttgtgagagtgtcctggtaacatgcttccaaggggaaaagcaaaattttgtgctcactgcctgtttcctctcacaacatgctgaaaagtcatttaatggttgtgtactgatcatatttgcaaacttcaaccctggttcaaggtcaaggtgcttgctctctgtgaatgaagcagtgtgtgattggcattcaggagcaaacttttattcctaactaggaatgttagggttactaacacccttctttgctagacacatggccagggttccatcagtactgactccaacatacattttaattgttacagatgaaaaatctcttctaccatagcatgagtctgcagtgataaatagagtgaagcattattgcgtacttttctctcatatatgtgggacacatatcgcaaaggctgacttatgctcagcatatcagctgtttccttcccatgtgaagggaaatatcttctaggatagtaattgctccttgtgatattatgaaatatatcgtcatcccctttcctggcatacatctcctacaatccttggactctccaaagtgatgtgtcttcttgtatgctaatgagataactggtggctggcagccccttggtagcttcaggttgggggctgaccaccagaaagaccaaggcagcattagagagggttgggacttttcagtcccacctcccaacctgcagggaggagacggggttgaaggttaagttgattaccaatggccaatgatctcatcaatcatgcctacctaatgaagcttccataaaaaccccaaaggacagggtttggagggcttctgcatagccgaacacatgcagtttcctagaagatggtgcccagagagggcatggaagctctgtacccactcccccaaaccttaccctatgcatcttttcatctggtgttcattagtacccttggtaatatcctttatatcaaccagtaaacataaatatttccctgagttctgtgagccactctaacacggtattctaaccccaggagaggatggtggaaatcctaatttataggcagtttgtcagaagcacatataaaacaatgtgaggcttgcaattggcatctgaaatgggggactggcttagggactgagccctcaatctatgagatctgatgctatctctccaggtttgaattgaattagaggacacccagctggtgtctgctgcagaattgattgcctgcttattagtggggaagcccttcccacatttggtcagagacgtcttctgtgttgactactaagtgagagtacaggcgaaacggagtttggttttatcctgtatgttcttagactctttcacattgtatgttgttgaatttttgcaacagcttagactgtcaccagataaaggacgtctgtttgctttctcttcaagcataaaatgtgtcattagctttgtaaatagattaatacttttttagcactagagtgatttatagcttttgttgctaaagaaatatagatatcaatgatgtggctatacttttggtcttgtctttgcctttagatataaaattttcaccttgaaaagtattattttgttcttattctaggaaaaaagtatcattgcttttcggagaggtccccgtattttgtttgaaaatgacactaaaaaaggatgggtggcttatgaacaagttcattataaacaatacactgggctgggcccggtggctcaggcctgtaatcccagcactttgagaggccgtggcgggcagatcatgaggtcaggagatcaagaccatcctggctaacaaggtgaaaccccgtctctactaaaaatacaaaaaaaaaaaaaaaattagccggctgtggtggcgggtgcctgtattcccagctactcaggaggctgaggcaggagaatggcgtgaacccaggaggcagagcttgcagtgagccgagattgccccactgcactccagcctgggcgacagagtaagactccatctcaaaaaaaaaaaaaaaaaatactgagcagccgggcgtggtggctctgtaatcccagcactctgggaggctgaggtgggtggatcacgaggtcaggagttcaagaccagcctggccaacgtggtgaaatcccatctctgctaaaaatacaaaaatagccaggcatggtgtggggagcccgtaatcccagctactctggaggctgaggcagagaattgcttgaacctgggaggcggaggttgcaatgagcccagatcacaccattgcactccagcctgggcaacagaccgagactccatctcaaaaaacagaaaagaaaagaaaagaaaaaaaagacactaaaaaaggatgggtggcttatgaacaagttcataataaacaatacactgagcggccgggcgcagtggctcacacctgtaatcccagcacttttggaggcgaggcaggcagatcacttgaggccaggagttcaagaccagcctggctaacagagtgaaaccctgtctctaccacaaatgaaaaaattagccacatgtggtggcacacacctgtaatcccagccactcaggaggctgaggcaggagaatcctttccacttgggaggcagaggttgcaatgagctgaaattgtgccactgcacttcagcctaagtgacagaatgaatgatacttcgtctcaaacaaacaaacaaacaaacaatacactgagaagtagagatgaatacattgctagcccagtgtatcagtcagggttccagagaaacagaaccaacaagatctctctctctccctgtctctgtctctatctatgaatgaagagacttattataggaattggctgatgtgatgatggaggccaaaaagtcccatgatctgtcatttggagatccaagttggagaaccaagaaagctggtagtgtaattcagcctgagtccaaagtcctaaaaatcagggagctgatggtataaagtcctggtccaagtccaaagacctgagaaccatgagtgctgatatccacagagaggtgagatgtacttcccagctcaaacagagaatttgtcctccctccacctttttgttctattccggctctcaatgagttagatgatacccatggaattagtgaggacagatctttactcagtctactgattcaaatgctaatctcttccagaaacacctcaccgacacacccagaaatcatgttttaccagctatctgggcatttgttagcccagtcaagttgacatgtaaaattaaccatcacacacggtaaaatccaatttttggacactcatcagcccttttactactatactgttatttttgaactatttatgtaaaagaatcatattttcagaggcttatcctatcacatacagggtcacactacagtttaagtagagtcctgtttgttcactatttgcctttttttttttttttttttggagacagagtctcactctgtagcccaggctggagtgcaatggcgtgatctcagctcactgcaacctccacctcccaggttcaagtgattctcatgcctcagccccctgagtggctgggattacagagccatcaaacccggctaatttgtgtatttttagtagaggcggggtttcaccatgttggccaggctggtcttcctggcctcaagtgatccacccgcctccacctcccaaagtgctgggattacaggcatgagccactgtgcccggccaacttttgtttttttgagacagggtctcactccattgcccaggctacagtgcagtggcttgatcatagctcagtgcagcctggaactcttgggctcaagggattctcctgcctcagcctcctgaggaggtaggacaacaggcatgcaacaccatgcccagcttttttttttttaagagatggagtcttgctgtgtttcccaggctggtctcagactcctggcctcaagtgatcctcctgccatggcctcccaaactgttggcattacaggtgttagccactgcatctggtcactatttaactttataatgctgttatgatttgtggtatttatattcctatgttcatgatttttaaaaaaacttcaacggatttaatatacataaaatgcacccttctaaagaatacaattctgtggtttctaatatattcacagaattgtgcaagcatcctgactagtgttagaacattttcatccccacagaaagaaactctgcatccctaagcattgactccctatttctccctctgccttacagtccctggcaattactaatctactttctgtttctatggatttgcttattctggacatttcatttaaatgtagtcacacaatatgtggtcttttctatctgacctctttttttttttttttttttttttttttgagactgagtctcactctgtcgcccaggctggagtgcagtggcgtgatctgggctcactgtaagctccgcctcccgggttcacactattctcctgcctcagccgcccgagtagctgggactataggcgcctgccaccacgcccggctaatttttttttatttttagtagagacagggtttcaccatgttggccaggctggtcttgaactcctgacctcgtgatccacccgcctcggcctcccaaagtgctgggattacaggcgtgagccaccatgcctggccgtttttttctggagatggagtcttgctctgtcgcccaggcttgagtgtagtggcgtgatcttggctcactgcaacctctgcctcctgagttcaagcgattctcctgcctcaacctcctgagtagctgggactacaggtgtgcatcaccatgcctggctaatttttgtatttttagtagacacggggtttcaccatattggccaagctggtctcaaactcctgaccttgtgatctgcccgcctcagcctcccaaagtgcagggattacaggctagagccactgctcccggcctctatctgacctctttaagttagcatgatgatttcaaaattcatccatattgcagtatgtgacttccttcctttttacggcctagtattgttcagtgtagggatataacacatttttgttaatttgtgcatcctggatgtttgtattgcttccagttttggctattttgaataatgctactatgaacattcatgtacaagtttttttgtggacatgtgttttcatttctcttggctatatatctatgagtgcaattgctgggtcatatagtaactctatgtttaacattttgaagaacacctaacttgttttccatagtgactgtaccattaacaattccaccagcaatgtacaagggttacaatttgtccacattttcatcaacacttgttattgtctcttttctattttagccatccttgtaagtataaagtgtcatctcactgtgagggtttttttttttttttttttttggtacagctttattgagatataatttacctacatactgagatataatttacccatttaaagtatacaattaaatggtttttactacattcacagttgtgcaacatcattgcaatcaattttagaacattttcatcatccacaagagaaacgtcataccctttagcaatctcgttgaggttttcatttacatttccctaatatgtaataacattgaacatcttttcatgtgctgcttggccacttgtataccttctttggaaaaatgtccattcaaatcttttgaccattttaagttttttttttaattgttgagttgtaagactctttatatattttaaatacaaatcccttaatagatatatgatttgcaaatgttttctctcattttgtgggttgtcttttcttttcactttcatgatagtgtcctttgaaacaggtcatgctctgtcacccaggctggagtgtagtggtgtgattatgactcactgcagccgtgacctcctgggttcaaatgaccctcccacctcagacagcaccacccagcccccaacccccagtagctgagatcacagacatgcaccaccatacccagctaactgttaatttgttttggttgagatgggggtccccatatgttgctcaggctgttctggaactcttgggctcaaggaatcctctagcctggccctcccaaagtgctgggattacaggcatgaactacctaccatgcccagcctgatagaggcttcacagcacaatttttttttttttttttttttttgagacagagtcctgctcagtcactcaggctgaagtgcagtggcacaatcttggctcactgcaacctccacctcccgggctcaaaccattctcctgcctcagcctcccgaatagctgggattacaggtgcccaccaccatgcccggctaatttttgtgtgtgtgtgtgtttttttttttttttttttagtagagacgtggtttcaccatgttggccaggctggtcttgaactcctgaccttaggcaatccgcccatctcagcctcccaaagtgctgagattacaggcgtgagccaccacgtctggcctgtagcacaatttttaattgtaaaaaagcttaacagttatttttccttttgtcatgtatacttctggtgtcatatctaaaataccattgcctaatccaaggttatattttcttctaagaattttatagttttaactcttatatttaggaccagatttatttatttattttattttattttatttatttattttttgcgacgaagtctcactcctgtggcccaggctggagtgcaatggtgtgatctcagctcactgcaacctctgcctcctgggttcaagtgattctcctgcctcatcctcctgagtagctgggattacaggctcctgccatcatgcccagctaatttttgtatttttagtagagacggggtttcactatgttggccaggctggtcgcgaactcctggcttccggtgatccacctgcctgggcccactaaagtgctgggattacaggtgtgagccaccatgcttgacccagaatttattttaagttaatttttgcctgtggtgtgagataggagtccatatccatttttttgcttgtggatatccagttgacccagcaccatttgttaaaaaggctattctttcccccattgaatggtcttggcacccttgctgaaaatcaattgaccaaaaatagtagggtttatttctgaatgttcaattccattccattgatctatatgtctatccctatgctattagcaccctcttgattactgtaactttatactaggttttgaaatcaggaaacatgaatccttcaactttgttcttctttttcaaggttgtttttggcttttctgagtctcttgcatttccatatggatattaggattagtatatcaacttccacaagaaaagatgctagtattttgataggaattgcattaaatatatagattagtttgaagtattggcatcttacaatatcaagtcttctgatccatgaacatgggatgtctaggttttctttaatttctttcaatagtgttttgtagttttcagtgtacaagtcttgcacttctttggttaaactgattcctaagtagtttatttattctttttgatgccattataaatgaaattgttttcttaatttcatctttggattgttgtttgctagtgtatataaataaaattaatttttgcatgttgcttttgtatctggcaaccttactgaacttgtttattagttttaataggtttataatggattccttaaggttttctatacgtaaaagtaaatcatgtcatctacaaatagagatagtcttatttctctctttcctatctggatgtcttttttttttttcttatctaattgacctgactggaatatccagcacaatgtttaatagaaagtgaacattctggccaggcacggtggctcacacctgtaaccccagcactttgggaggctaaggcaggtggatcacaaggtcaggagatcgagaccatcctgggcaacatggtaaaaccctgtctctactaaaaatacaaaaattagccgagcatggtggcgtgcgcctatagtcccagctactcaggaggctgaggcaggagaatcgcttgaacctgggaggtggtggttgcagtgagctgagattgcaccactgcactccagcctgggtgacagagcaagactccatctcaaataaacaaacaaaccaaaggaaaaaaaaaaggaaagtgaacattcttggtttgttcctgattttaagggagctttcaatctttcactattaagcattatattaactgtgggttatatgaatattttaatgaactacttttgagctactagtcctttttttaaaaattggaaatatgatgcactgtgatagtaatattgaaaatgaaaatttaatcatggtccagtcagaggttttagttggaagtaacagaaactaactctagcttatttaagcatgaaggaagtttactgatgacatattgtagaggaggagaaagaaacaggttcagtgaaggattggaacaagaaggtcccagtagcaactaagaccacaggctaaacattgccataaacccatccaggaagaccattactgatgaaccactaaatgccacagcttggaatgggggcctcaaaacactgaatactgccccattgcagaaactcaagttgcccctagaaacagatgtttctgccaccactgccaccactaggcatcataaccaattcctgattctttgtgtctcttgctctcaattggagttggaggaagaagactgcagatgtattttcacccttgtctttcttaccctttgatcttctcgtgatgaggaggtatagagatccatcattaagagcccacctttgtaataagcctagggcagttcaagtatgcagcagtgtagttggaaggaggtcttgtgctgaagttgtgtttatgagttacaacactgcttttccttaaattgcatatttatttagggtggctatactagtatgttttcatgctgctgataaagacatactcgatactgggaagaaaaagagatttaattggacttacagttccacatagctggggaggctgcagaattatgatgggaggcaaaaggcacttcttacatggtggcagcaagagaaaatgagaaggaagcaaaagcagaaacccctgataaacccatcagatcttgtgagacttattcactatttcaagaacatcacgggaaagactggcccccatgattcaattacctcccactgggcccctcccccaacacatgtgaattctgggagatacaattcaaattgagatttgggtggggggcacagccaaaccatatcagtggctttggacaaactaatggaaatcctatagaggctgatgactgtagcacctttccacaccaaacataattcagatcctagcggaaccacttgatttgattatgtgagcttaggaaaattagttagattttctgagcttcagtttctttttctttttctttctttcttttttctttttcttttctttttttttctttttctttttctttcttttttttttttagatagagtcttgctgtgtcacccagattggagtgcagtggcgtgatctcggctcactgcaacctctacctcccgggctgaagtgattctcctgcctcagcctcccgagtagctgggattacaggcacctgccaccaggcccagctaatttttgtatttttagtagagacaaggtttcaccatgttggccaggctggtctcgcactcctgacctcaagtgatccacctgcctctgcctcccaaagtgccgggattacaggcatgagcccatgcctggcttcagtttctttgtctagaaaatggtgacacactttcacagggtcattgtgagagtgaaagggacaatgaacataaggcaaataggacagtgtttgggacataataagcattaataattagtggctagtgttcatattctctgtcagtctacttcttggctaccaggtccttttccttggaatcagtcccagtgtctctttttcactctaacttttgaaccacctacagctcccagtcatctttcatatgtcagctcccaaccagtgccagtgttttttaccttgagtatctgatccaccccaaaacggcactgcatcatattgaacttggccatgcttttggccaaaagctagaaatactgttggctgagaggcttagaaatgcctctccagccctaccataatcagccgtggcaagctgacatgaggcaggccagagcagccaggtgtcacaggctctaaagttaggctgcctagagtcaaacccactcatctccgccacttatcgttagtgactttggtgaagttatgtaacctctgtgtctcagtttcatcttctgtaaaatggggatattaatagtattattttgtagagttatgaggattcaataaattgatatacgtaaagcattcagaacaacggtaggcaagtaagctctctagtctttgctattattattattattattattattattattattattattcagtctggtactcaaacccaagcactggagaatgagggtacaaggcaggaaacccataactgggaattaagatgctaagatcaaactgcacacagcagaaagattgactggctcaggttcaacagtgagctgccaatgttggtccctcaaagttcagaagtggggccagtctccaagcctgaagtgtagctgttacaaagggctcacctgtgcccctgagaaggcagcagggggatgggggcaaccatgttattgagaaaaagagagcatgggctttatcaatggataaatggccaatggatagataacgatggtttgctggcaaaagagtaaaaggatcagagcgatgctttgtaacagtggtctccaaagtgaggtttgtgctaattcctggaattcattaggagctggctgccctgagccgcagaaaaaatattagtatttatatttatttttctttaaaagaattaaactttactgatgccctatatatcaactgatgctggaagccacatttgtctgaacatgagtcaagtgtcataaatcataagagagatctcccaagaggaatttgtgtgctgtagggtgtcattaggctatttttataaataaaataaacaaaaaacacaagacctttaaactttagatagtagaatcttgggtggcaggttatctcacttggttagagcccagtgttaataaatcacagagtccttataatactgtaaagtgagttgaagagtgaccatcaaaatcaattgtatcaaataggattatgggccattgaggggtaaaggacttaaaagaattgtcaatttaaaaagatgaactgtgaactgcacaatttttctcttacaaaaagactagtgttcaaaaatttctgaccttttctgtgatgacaaatgaatttaaaaactgggctaccaggagaaattacaataatcaatcaactaattaataataaaacaattacaataataagcacatttaattaatatctttaagaaaaaaaatggtgtttaacagtgaatgaaaagtcactgttttggggggccaaggcaggaggatcgtttgagtccaggagtttcagaccagccccggcaacatagtaagacctcatctctacaaaaaaattaaagattagctgggcctggtggtatgtgcctgtagtcccagctacttaggaagctgaggcaggaggatcacttgagcccaggagtttgaggttacagtttgagtgcagcagccgagctatgatcacacacagctccaggtatgattgggctactgcactccagcctgggtgacagagagagtttgtctcaaaaagcaaagaaaaagaatagaaaagtaactgctcttgcaaagaaactctttttttaattaagaaagcattttgaaaatggatgtctggaagtcaaattgtctgtgtttgcagacgacatgattgtatatttagaaaaccctgttgtctcagctcaaaatctccttaagctgataagcaacttcagcaaaaatcacaagcattcctatacaccaataagagacaaacagagagctaaatcatgagtgagctcccattcacaattgcgacattgtttttttattcctgaaaatgatataactttatcattacctatgaaacatttatacctgcatgctttacaaaaaacttggaaagagtcttttaatctattaatattccagacatagatttacaatacttttcaatagcttgcaaaaataactcttggacatcagtagatttattggctgaatttcaattaaactttgtatagctgctggatagaaatgaatattaggatttagcaatgtgtttgtggtgcatttggcattgtgtaaatttgagactatatttctcagctatgatggcaattaaaacacgttttcaaaataaagttagaaacacacttgtgaatcatttcatcacaaattgttaagccaattttttttaaaacagtggaatttactcaattatagtgagaacaaaaatgtttttgtacctcaaatatataatataaaaatttaaattaaaaatattcatttcttctttatctccttttaatttctatacttgtgtacatttataatatatatatgttataggtggacatcatttagaaataatatataatatacatttatattaatatatacaatatattaatatgtaatacacatgtatatatgtaatatataatacacatgtatatgtgtaatatataatacacatgtatataatacacatgtatatgtgtaatatataatacacatgtatatgtgtaatatataatacacatgtatatgtgtaatatataatacacatgtatatgtgtaatatataatacacatgtatatgtgtaatatataatacacatgtatatgtgtaatatataatacacatgtatatgtgtaatatataatacacatgtatatgtgtaatatataatacacatgtatatgtgtaatatataatacacatgtatatgtgtaatatataatacacatgtatatgtgtaatatataatacacatgtatatgtgtaatatataatacacatgtatatgtgtaatatatacatagtcataggtggacatcgtttagaaataaataaattgggctgggcgcggtggctcatgcctgtgatcccagcactttgggaggccaaggtaggcagatcgcttgtgcctaagagtttgagaccagcctgggaaacatgtcgagaccccatctctaaaaaaaatacaaaaattagctgagtgtggtggcacatgcctgtagtctcagctacataggaggctaaggccggaggataacctgagcatggggaggtcaaggcttcagtgagccatgatcgtggtactacactccagcctgggtgacagagtaagactcgatctcaaaaatacaatacaatacaatacaataaattaaaatgaatatactagagattcatgctcaagcatttgtattgatacggagtgttttcaaaagggtttggaaccactgctgtaggaagacaggtctgagcctatgtatgagataaaagaacagaaacgacaaaaagatgagaggacagaaggctagtcagttacttctgcaatacgatattccaggccggtgttaataagaggctgaattaaggtggtgacattttcaatggaaaggaacagacttaatggaatgagataatgagaagacggaagtaataaatgttgacaaccaatgacacatagaaagcaggggagaaggaagtgtcagtaactgaattgagagaaagacaaagttattgaggaataaaacaatgaattttgttttaaatatgttgaactttagtgccttgggaacattaagtgaaaggacctatggaccagttgaaaaaaagaaactggtgctggcttcagcagcacatacactaaaattggaatgatgcagaaattatcatggcccctgtacaaggatgacatgcaaattcgtgaaggcttctgtgtttctttttttttttaaagaaaaaactggatgacaacggctaacaattactttttagagaagttcatgtgttttgcaatctaacgtacattactgtaaagataacatgacttcgtggaaaccaacagccttgacttcttaaaatatgaacaccttttggaggcatccacaacttgtttttccccccaggacttcccactgtagcagaagacaaaaaagagagagaatacagtggattaatatgtggccattgctttgggaaactcaggttccgaacccactctaccattttgtagtaatgaaactctggagatttatttaacacttctaaggtttagtccccttattgttaaataatggcataataatacttattttatatacttattgtgagaattaaatgagcaaatatatgcaaagtgcttatgtccttgccttgtatagttaagcattaaataaaaaatagttctaattattatctattcactatagctcttggaaaataaattgactactatattgtctctgatcttagcctactatatcatattctacatattcacatgtgtgtgctcatacatacaccaaaaaataaagatcattcgcaaagtttttagtatttgaaacctagactgagaaagaatgttaaaattctcatatttggatcaaacctataataatatgatccttacatctacatagaatttttcagtcacagaaattatatacattcataaagcacaacagaaatccaccatatctatacttggtgtcctttaggcagagagcagagcaaagtggagaataaaaatattcaaagaaaaaaggtatactttcctgaaatgaagaacagaagctacaaatttaaaagatacaggccgggtgtggtggctcacacctgtaatcccagcactttggagggccgaggcgggcggatcacgaggtcaggagatcgagaccatcctggttaacacagtgaaaccctgtctctactaaatatacaaaaaaaattagccaggcatggtggtgggcacctgtagtcccagctactagggaggctgaggcaggagaatggcatgaacccaggaggtggagcttgcggtgagccgagatcgcaccactgcactccagcctgggcaacagagcgagactctgtctcaaaaaaaaaaaaaaaaaagatacactgtgtagtagaaaaaattagcatagcggaatagaactgtgacacagctacatgaagtgactaaacttcatgaactaagtgcataatcttattggtatctaggtagaaaacacaagccacttgtaataggaagatgtaaagctgagctcaaactcattcacaataatcatccatgccaaaagattatagaacaatgtttacagagttctaaggagaaaccagtgtgacccaagaattttatacccagctaaatttccacttgtgtataaggccatcaaaaactagtctcaaatgacaaaggcttacttcaggtaaaacacatataaacactggttgaaaaagctacctgatgataaagtctagccaattaagacatttctaggcttggcacagtggctcgagcctgtaatcctagcactttgggaggccgagctgggcagatcacctgaggccaggagttcgtgaccagcctggccaacataggtgaaaccctgtctctattaaaatacaaaaattagctgggtgcagtggcatgtgcctgtaatcccaactacttgggaggttgaggcaggagaattgcttgagcccaggaggtggaggttgcagtgagccaagatcgcaccactgcactccagcctgggcaacagagcaagactctgtctcaaaaaaaaaaaaagaaaaaaaaaaagacttttccgaatgaaaaactagaaaatgggaactatttaataaggctaatcatgaagtctgaatctatataaatctagaaataaggtaaaacaactatagatattacaaaataggacctacatatgtgaataaggaagcagagctgccgagcgaagaggtggacatctgggtggtggtgtgacccagtacagggtgtcagagcctaagagggcatcatccactcaggggtgcagcccagcatagggtgccagaatctaagcagggtacctatgttggagggctgcttgagtgcaaggagtgcctgcatagggtgagacaggtgtccatgtagggtagtagtggtggctcagtgcagagtgtcagagtctgagccaaatgaggaaggtatccatgcatgagggcgacctgttgatgctatcagagctcaagcaagataagaagggcatccacatgggagcataggctggcgcagagtaaaaccttgagcagcacatagagggactaccgatgcagggtaaaaaggtttttcgtacttatttgccatttttttctgaaagtatgtgatttttcttaaaaagtgccctaacatagatttccccgatattacagataattacctgtggggaaatgacatagaaaatatatttaaagtattatttgatgtatatgtatacagatactaggagtatcacattaatcacatgacactgattcctttcaactatcttgcttttctaatacataaataattttgcatgtgtcattaagaaactttctcatgctgatttattaaagcattttaatgctacttaaagaatatgaagtgtggccgggcgtggtggttcacgcctgtaatcccagcactttggcaggccaaggcaggtggatcacaaggtcaagagatcaagtccatcctgaccaacatggtgaaaccccgtctatgctaaaaatacaaaaattagctgggcgtggtggtgcatgcctgtagcccagctacttgggaggctgaggcaggagaatcacttgaacccgggaggttgaggttgcagtgagctgagatcgtgccactgcactccagcctggagacagagcgagactccatctaaaaaaaaaaaaagaatatgaaagtgtgatgctgagtgcggtggttcacacctgtaatcccagcactttgagaggtgaaggtaagaggatcacttgagccaaggagtttgaggctgcagtgagctataatcacagcactacactccagcctggatgacagagcaataccttgtctctttctcttaatttagaaaaaaaaaaaaaaaaaggaagtgggcagactgcaagtaaaccctgagaactcctagatcacctcagtttgcagcacccattcacctctttcctcaccactgcctaagaaggcacatgaagcttagtcactgtgcagactctcaaaactttctggaacttcatgcaaaggttaagccttggaaccaactctgaatttccttgtggtttcaaacttgtcacattttcttctcaccttgtcaccacccacacagactcagcctcctggatgcatcacgcttgggttgcttcacttcctggctcctggtaagccacaattgcaagagctattgctggtaaaactggtgacccattacaggcacacaaataagaacataggtgcaggggagccacaagtgcactatctgaatgtgtcagggtgagaacattatgtttcctcagctctcactcatcctctggtggagaggactctttggtcttcagtcttccaataactgtctatagaatatttttgcatgctattcatctatacctgaatgcaagcatgctttcagtacagaagaaatgtcatataggtcagaataatgtttcaatgggctcagggtttttgtccccggttgtcctatcaacccattttgtactatctactggtagtggttccaaattctgatctccgaactggtgatgatatggaaataattttttcattattattaatctgtcatgaaattttagaaataagaataatgtgggagaacaggtctaaatttcatttggtaaaaaaggaactcttttttctttttttttgagacagggtctcactctgttgcccagactggagtgcagtgacacaatcatggctcactgcagcctcaacttcctgggctcaggtgatcctcccactccagtctctcaggtggctaggactgtaggcatgggccaccatgcctggctaattttattttattttattttattttattttatttagtatttttttgtagagatggtgttttgccatgttgcccaggctggtctcaagttcctgggctcaagcaatctgcccacttcccttggccttgcaaagtgtttcttttcctttttttttttttttttttttttttgagatggagtcttgcactgttgcccaggctggagtgcagtggcgtgatctcagctcactgcaacctccacctcccgggttcaagcgattctcctatctcagcctcccaagtagctgagattacaggtgcctgccaccacacccagctaattttttgtatttttagtagagacggggtttcactatgttggtcaggctggtcttgaactcctgaccttgtgattcgcccacctcagcctcccaaagtgctgggataacaggtgtgagccactgtgcccgtcccaagaactcttctttatcctgagactatgtccttgtatttttagtttcaaatatagctctcctttcggggccaggtgtagtggctcacgcctgtaatcctgtaatcacgcctctaatcctagcactttaggaggccgaggcaggcggataacttttgtccaccaatctcagcctcccaaagtgctaggattacaggcgtgaaccaccgcgcctgactattcttcacatcttgaagcacagctaccacagctgacataatagtccaacaattttgtcagcaaataggccaatcctttttcaagaatatcaattcctcccccttttgccacccaacagccttccattcattaacaaccacactggctaccagaaattgggaaagagaagagcagccacagtagccagaaagttaagaattgtcctctcctgagtcctcacctcttcaaaggcagaggaatgtttatagctgggtcatccctgaaggcactagcaaagcaggaataccaggatgagagtgacagtgagagaaacactcatctttaattaacgaaatctgaattttgtaatccccaaatctagaaagaagctattttaatgttagcatacatgtaaggtttatgtcctcttgaaaaatcaaatttaattttgagttttcttttgggacaaggagaccctcatctttttagtgcttaaggtctctaaggctctctctctctctctctctccctttttctttttttaattgagacacagtcttggtctgtcacccaggctggagtgcactggcatgatctcagttcactgcaacctctgcctcccgggctcaagtgattgtcctgcctcagccacctgagtagctgggactacaggcgtgtgtcaccatgcccggctaatttttgtatttttagtagagacagggtttctcctgttggccaggttggtctcgaactcctggcctcaagttacctgcccgcctcagcctcccaaagtgctgggattacaggtgtgagccaccgcactcagcaaggctcttctttatctggccttaattgtgttttcttcacttctgcatgcctgcagccttgtactggcataaagaccatgcttaatcaaggtctgttgaattaaccaataaatgaacaaaagaccttggagagtagaatcaagtgctgggaaagggacaaagatagggaatggggagcagggtggcattggaaagcaccataaaagaacttgcctggaacatctgcttcagatttgctgtaatttctaccagttttgtcttatctttggttacactagttcaccctcttttgtgtggcttcattgttctttcctttacttgagtgtttcccttgagctagtaattttttcttatgaaggtcttttgcagacctactctcctcttctatgtccctcccacttaggatttcccagggagctttggttcgtatgtgggcttgcagtatttgggtagctgctttctccagcactataatttcccttgtaccatttttttcacccgggcctataacagagagatggctgcagactgttcccatgaatagcatcaatctcttcaccttctggagcttcagcttgtactcttaagatggaatccagctggctgggtgtaaatgtgctttgtttgtgccaattcagtctcggcaagtgttttcatcaaaattagaggctgaaattgctggctgccagggcattcctggtaactgaacatttttctggttgaagatgggagtcatgccctaggccctttatgcaagagtgcaccatcccaatttcttgctgtttttactggaggatgtcttcagatctggcacaccatactacatctgagcaagacagtatttggtcccattcaaatttgttgctagaatctagggccagcctttgtctaacctgtaaaataggtataaggtagaaccctggtgaaactaagctatattgccctgtctcagcccagattcacatccaaaagaaatcaaagaccaactcctataaaagccttgaaaagtaaagtatgtaaatcttcaccattcattattcacctgaagtgatcttgagggcatctaggagaaagttgctgagctcattatagagtacaccgtcactctactaaagtcgcacacttctcaagagctgcttccaccctcatataagctcattattaccctcttccctctcaggggatgccaatattttttttatttgaggcaaaattcacataacataaaattaatcattttaaagtgcacaattggctgggcatggtggcttatgcctataatccccgcactttgggaggctgaggtgggccgatgtcttgagcctaggagtttgagaccagccacgggcaacatggcgaaaacccatctccacaaaaaatacaaaaattagccaggcatatggtgtgtgcctgtagtcccagctacttgggaggctgaggtgggaggatttcttgagccggggaggtcaaggatgcagtggcatttagtatattcacaaggttgtacaactattggttctatctagttccctaatattgtcattacccaaaaggaaaccctgtacccattaagcagccattcccccattcccccctgcaccagtatattttgtttttttaatatatttttaaaaaaacaacaaaacagagacagggtctcagtatgttgcccaggctggtcttgaactcctgagctcaaaaaatcctttcacctcagccttccaaggtgctgggattacaggcgtgagtcacctctcctggccctcttccagtaattttaaaggtcccctaggctattcaaaagggtagccagggccaggcacgatggctcatgcctgtaatcacagtactttgggaggccaagacgggcagatcccctgaggtcaggagttcgagaccagcctgatcaacatggtgaaacaccatttctactaaaaatacaaaaattagctgggggtgtactcctgtaatcccagctactcaggaggctgaggcaggagaatcacttgaacctgggaggtggaggttgcagtgagccaagatcatgccactgcactccagcctgcacgatggagcgagacttcatctcaaaacaaaaaacaaaacaagaaaaacaaaagggcagccagggctgagaaccgttagcgtcatgcgatctcatttcccctatgctctccctacttagaatgccactgtttatccaggtggccaagcagctaaatcaaagattctctttagaaatgtgggggcaagttctgtttttttgccccagtcacacaggtaccattggctttggcaacccaactcctcctctttcagtatttttctccatcatctgcacttcattctcactggcctttgctctccaagaagcctgttaaacaaatcctctctaaggtaagaattcccactgtttctccccattccttaagggtcagctgatctcaagattccttgatgtttgccttttaattgacggaaaagcctttcagactcagagaacccctctctaatggtgcattttaggcactaaacagatggggagaggaaggaaatgttttaggaatgaaggaaacttttccagttactcttcacctaagaatgacacatatactgaacaaaggatggggtttgcagttggaagatagcgtggtcttgggcaccagtaacctaatgtctcagagcctgtatccttacctgtaaaattatgataatattgacccggaagagttatatttccataagttgcagccataggtactgagtctggttgaaaatgaatttaataaaaggatattggttggttcacagaattgctaggtgagttggcaaaatcaggggttataaacagaaaggaagaatgccgcaaagcaagcagcagaacttaggagaccgctctactgtcaccaagtaccagctgctgcagctcatcctgccagcaccactggcgctgggggctgggtgttctgtttgctctgttgccccagaagctatacattgctgccatttcccccaccacagctagaaagaattatccacagcctctgcttctttgtttcactagctcccaattcaaagtctgtcacaggtttgtttgcttggttaaagctagactatgtgtctcatgtcctgtgagaacaagcacctggcattttcagcctgcagagtgggagaaggccctgccttccaccacgactcctaaggtggggagggttcgccggatgaagggagggagttcagacaccgggcatccaaaaataaagacaaaggttccttttccaattgtgggggttagtgagacaaagtgtatgaaaagcataaacgctgaagtgccatgttggtattgcttagcaacactttgttcacactgtcacgtattgcactgcatttcctttttttcctccctctcttcttctttctgtctcatacgcagttatgtgccctccagcccaggacagggcacgctcataaatgccgaatgaatacaatattctgctgcctttgcttgtttgatgaagcaggttggtgtttattggtttgtccccgttgccaaaggccctgattttcatttggggatccatgtagttcatgggaatcagattccattcccagcaccagcaatagggtttatatactaaactaagtcgatcagcatattccatatccctggccatagcaattggttcaggagcaggcaggtgacctaaggagttccaatctgagttacgcttggcaattttgcaaggacaagaacatcctctgttttcttgctgaactatgaatgagaatgcatgtagcattgggagtttctggcagccctcttggaatcaccaggggagtcagacttagaatgaagtgaacattgtagaaggcagggccacaggacaaaaagaaaccaggtgttttgtgcccatttagccaaaatggacacaggaaaaagctatgcccaaatccagacttctcctttggacttctcagttatatgagccaataaattccatttattatttaagctagaatgagtcaggttttctgattcatacaactgaaagtatctgatacctgctttgctccttccctgcctcatgataatagaattactgtttattcagtgctggctaatagagagtcttttggaaatacagatcaaaattactatcatgttctcacaattgggaaacagcataatctatgccctagaaacagaactaactaaaatttaaaatagaatagccctacctaacctcagccaaattttaaaagaaatttcagtaaacatcttttattattctttggcctagaaagatgaaaacatcaaggaagtaagagaaaactctcttaaacaaacaaaattaaacaaaacaagaacactacaccaggccaagcacagtggctcatgcctgtaatcccagcacttagggaggtagagacaggaggactgtgtgagcccaggagtttgagaacagttggggcaacaaagtgagacccagtctccacaaaaaattaaaaaaattagccaggcatggtggtgcacgcctgtggtcccagctacaagggaggcgaggcaggaggattgcttgagctcaggaggttgaagttacagtgagtcgtgttcatgccactgcactccagcctggctgataagagtgagactttgtctgattgtctgattaaaaaaaaaaagtccaccccctaccctaaataacacctccccacacctaaacacctaaaccaaaacaaacaacaaaacataatgcaaagaaagcaaaatgtattctatctaacctatagggggaagtactatggagtgatatcctacctggctgtcctaaggcaggttcctaaaagcatagcctgagacagggatgcttacgtaagtgatttattgaagagtgcccttgggagaaacctgaaagggattaagggaagcagatcagaagaagatgctgagcaagaacgaaaaaaagaactcttacctcagcctgattctgcagaaagctctgcctggagcataaattgctccaaagtttgtctcatccagaggcaagggggcctgtataccagtaggatgaccctggaagaggtggggtggaggcagtgtgtgtaatttcttaggcatttctgggcaaagtagctcctgtcagccaaggtaaatcttcccacaaagatgcagatgtaagtaagcatcagctaggagatgggtgcacgagcctggtagagagaatccgggcagacaaccaacagcacttgtaagaactgatatggccaaaggttctcttgaaaattccctcaatttgcccattttgagactttatttaaaaaaaatttcagaaaatcattcattattattattattattttgctgcttgtaacacattagcaaatttatgaaaattctaattgcatgccatttcatgtttccatcatccttgtcttctagggacagcttcttgtcagtgcctctaattctcctttaagtttatgtgtctctggctgggtggtggctcacacctgtaatcccagcactttgggaggccaaagcaggcgatcactcaaggccaggagctcgagaccagcctggccaacatggcgaaaccatgtctgtaccagaaaaatacaaaaagtagccagatgtggtggcgtgtgcctataaccccagctacttgtgaggctgaggtgggaaaattgcttgaacccaggaggtggaggttgcagtaagccaagactgcgccactgcactccagcctgggtgacacagcaaaactccatctcggaaaaaacaaaaacaacaacaaaaaaaaaaacagttaatatgtctctatggccctcagttaattcttcaatttcttcctccgcaggtactaaccacattactgttcacctgcatattgcattttatttttgttaatggtcagtaaacctttaaagttacttacacatcctttctgcagttttaaaccaacatgtacatctggttttggctttgtttttttgtttttgtttttgagacagagttttgctcgtcacccaggttggagtgcaacggtgcgatctcagctcactgcaacctctgcctcttgggttcaagcgattctcctgcctcagcctcccgagtaactgggattacaagccccagccaacatgcccgactaatttttttgtatttttagtagagacggggtttcatcatgttggccaggctggtcttgaacacctgacctcacgtgatccacctgccttggcctcacaaaatgctggcattacaggcatgagccactgtgccaggccctacatctgttttaagtttagttgttactttcattctctcactttttctcactgttagttagatgtgcgcacaatgtacatataccctagagtgagttaagtgcactgaaccccagcatgtgatggcaggaactctggacaggttttgcacacagcttaagttcccagctgttccatgtcctgctatttgacttgcttgagctggtggagcttaaaacaagaatctttctaggctgtcctgatactcttcagagttgtgagcattgtgtgagataacataccggaaggcacacagaaatataaggtgatagtattatgcacactgtgattgatatgatatttatatttcaaattccaaatttgctttcagttggttgccttttgggttctgagatgacttcatctcttaccaatgtttcctgggctataagttgctaggatttgactttctcttgcagaggtgacacacagcgagtagtcacttgtcaaggtgagtcaacactagggggaaccaggcattgagcaaattgaagtggaggttttcagtgatgccatctctcttcttccttctctatgttcatcttctcaggagcctcccatgccctcagggtggccgctggattttcagagcccaattcactgggctgtaactacattttccatgaactcagacagacagcctcatcaacaaataaatgaactaaacaaagccaaaaaccttctgttctatgtcccattagctttcaggtctagatgacatgttagaaaactgctgggctctattaagtgtcaatggctggaaactgttcttaccctccatttctctctcccactctttgagatgattatttcacaccttcctctcttttctcaaacctccaacacctactccaacatccttacactcagctagtggccttgctttccatttcattaagaaaataaaagcaatcagcagagaaccttctcccaatacctcacctacccacttaattgtacctatgcccatatattctgccttcccatttgtgactactgaagtgtctgtatttcgacctaagacccatccctccactggtatattagatacactatcccttcccaactactcatactcaaagccatggctccagcaattctcccttctctctaatgggtcatcacattttccctctttactagatcattcctatcagtatacaaacaacctataatttctcccatgtttaaaaaacaaagacctggagcggtggcttgcacctgtattcccagcactttgggaggctgaagcaggcagattgcttgatcccaggagtttgagaccagcctgggcaacacagcaaaaccctgttgtcagatcctggggtctgggtccagcctatgcggaatccaagggcagtgggtggatgggcagaaagaacacttggggggctgtaggcaggtgaaagatgattttattcagcagcacctctcatcaacagctttctcatactgtccacctttatctcggctgtctgctctggctctgcggctcctgccaccctcacaatgcagttgcatggctggctctcccttgccttcagggtcagcagcttaacttcttctctctctgggctccggcgcgagccatgctgtggctcccatctgtctgtctgcaggatggacagctctggttctctctctctttctctgggcaccagtgtgcccaccatgttaagccatgttgagccgagccgagccccaagagccatgtctgtcatgcacagtgtcaacagggcagttatatcttttacagacaacagtggctcagggccatgtatgaacttacacaaacaggttacatagcaagtggaggggtgcccttgcgagccaaactctccaagtcatgcaggcctggatatccgccttggcctattccttgaccaaagcacatccatgtaccttacacctgtctctacaaaaaatacaaaaattagccaggtgtggtagcatgtccctgtagtcccaactacttgggaggctgaggcaagaggatcgcttgagcctgagaggtcgaggctgcagtgagctgtgattgtgccactgcactccagcctgggcaacagagtgagacctcgtcttaaacaccaacaaacacgacaacaacaaaactgttcccattatctagacatacctgccgctggatttcatacaggcatctcaaacctaaaagttcccaaaatcaacacctaatctcttttcccacacactccaagcccctccatttagcatcttttctcctgccttctttgtcttggataatggcaaagccacctacctggtcaccctcactagctcatgaagtcatcttttacttcttcttcccttttacccataaagttgctaaatcttgtcaatccaacaacctaaacatctctaatttatcttctttttatcctcactgaacttgccagaattagctcttgcctggatagcagctatcccttagccttgcccaaatggttcctggaattttcttgctaaaacacaggtgcgatccacaccattcctcctcacaaacagctctgtaagttttccatttgctttggaataaagcaaaaccccattagtgtggtattcaaagccttcatctacttctagtctttgcaggcatggcttctgctgctcttcctaacacatcttgtattccagccaccagtcacgaaatccctctctgtgcatctatccttgctggtctctctgcctggagtgctcttttctccatttttaccatttgagaatttctattattaaaaacaatagaaataacggtgatttctgaacgcttgttatatgccaagtattatattaaatgttatgtatgtattatttcttttaattttcagagaaatgaagtaacttgccctggttacaatggctgaaaagggactgatccaggatttgaacttggttctgctgttgaagagcatgatcaagcagtattggtgacgttttctctgactcttcattatttttatttttaatttcttttatttatttattttgtatttttagtagagacggggtttcaccatgttgaccgggctggtcttgaactcctgacctcaggtgacctgcccgcctcggcctcccaaagtgctgggattacaggcttgagccaccgagggaggtgactcttcattataatggcttttgtgtgttccaaaaacaggtttttgttttttgtttttttaagcttactatatagaaacagttttattacagaatttaagcacacagactctgaagtcacactccccaggtttgagtcttggatctgtggcttgccagctgtgtgacctcatgtctcctctctttatctttgaaatgggaatgataatagcaccagcctcataggactgttgtgaagatgaaatgagtcaaccaatgtaaagggttttgcacagtgcctgttatgtaactcttgtccagcagacacatccagtcctgtgttgtgtctatgttctgtgtcccttcctagattctgtcctctgggaggggagagatccccttcattcattttccaatcctcctgtacctggcacaacagacctttcgccagattgggtgctccacaaacatttgtcaaattgaatttgtaaatctgcaggtgtttgtgctggacaatgagacacttacaagttcccggtctatgctatgctttaattacctacgaatcttgtgaagaaaatggttcttgaatcaggctggtcatctaaaagcttttgccctgtttttaaaaaatccacgtcaattctttgtcatttcttggtgctagaaacatttcaaatctctttgagctaaatgaggtgatggctatccagaatgtcctggtttgatcataatatattgtatgcatgtatcaaaatatcaaatgtatcccataaatatgtacaattatcatgtatcaaatacaaaaattaaaaaaaaaaatccaagtcattgccactctgcttctgtgaacaggaagcctttttaccttcaagcctttcccaagtcccttccatttgtaaggccacaccttttccttggggaaagaggaaagaaacacctgtcataaggttcaagacttctcagacacaattggaggtattcagctgtaggtaaacacaaacctgtaggtaaacacaaaagtgactgaggtccagagctttgggtttcacttataaccataagcaactgtgtacctgctaaggaagaaggctgcagacctgaaagaggcccacggaaggcctggggatttctgagaggacaccggctcaagttacattcccatattatttcaccaccctcatgcttgtttatttacatttcaggctgcctctctaggcgaggctgcaggagtgaaggggctggaagaggtttcaaaggagagtgaacgtggtagaaaaggaaatatttgattagaagttaacatgtcctctggggcttctttgacttggattactgtaaaagtgcatggtgtaatagttgagcactcccgggaggtggtgggcggtctctctgtacagagttgtggctttgtttctgatgagttgcagctgctgtgcataatgtagactagatcaaatggggcatggagaagagccattcacaggaccggagtgacggtgctcgctctgatggcagaatactaaattaatcatcttcacctaaacctgtgctttctcctggcctgtacctcagtgaatacctgcaagttgcttaggctgtaacttgaagtcagcctacaatcctctttgtctccagatcctgtccactttcctttccgaaggtctttcagatccatttccttctttccacctccactggcactgccctcattcagagtctcatcatgtcttcctggattgcagcttccttccaggtctctcagcctcaagtcttaggcctcccattcaattttccgtgttactgtcagaggaatttttctaaactagcttaaaacccgtctgtggttctccatggccttccagatcaaatgtgctccctgaagactggcctgtgagccccttcacaccagtaatcctgaccctgcatgcaattcccagaacacaaggcatttgttctcaaatcctgcggctttctttgcttgcttctcctcctgcctgggatccttcccatcctccatggtttctctcctcctttcctcctcctcaagttcagatatttccctcacctgtaccccctctgttgtagcatttatcacaaactacactgaatctcttgactgggcagaagaatgaattgtttcccagcatctagctttgacataaaagttgctcaataaatacttgacgaatgaatgaactctattaaagtagggttcagtcatagttcagggaaggggccctgaaatagctggctctgaaagaaggtaatgccggttattgcgattatgttgttagatgggtagaatttcgcattcgattaagggatagttttgggtttcttcaagctaaagaaactaaagcctataaaaggtgatttaaaagacctcttctctagacttgatgaaacgctgtaattgccatctttggctgacactgaggagttcaggaatgccaagcaagtgtttccagaaatgtcaaacctgctgttttaaaatatgtcattccagggcacagttaaatatacaacttgctccgatgaggtgggagaagtgggccggtgagctgtgaaatgaaatctgcctaatgagggtcgaggccagcacacacagggacctatttgcagtaaaacaacgtggggtgacgcctaagaaatagacaacattaacacaaagggagcctactacgtagcacatttccgctaggcataaaagagacacctttccagaaagcaactctaaaaatgaatgcaccgcctagtgaggtgcgagccttcctccccacgaggcgtcccgtgcaaccgcacgcggacagcggggctccagcggaggcggggtggatgcggagacaaggcgcctaggagactgggctaaggctttgagtgtccgaacgaagattctttcgaacctattgattttttctagtcttatgattctttcgaaccttttgattctttccattctcggttctaagcattaaagcgcagctgagaaaggcagcaacaaagatgggaagagaactagcaggagttctcagagaaaaatgggtgataatttaggggagaagccataaagaagagactaagcgagaagcggagcacacgcagaagacgaaacaaggaggaggagaagagaagaagaaccttggcgaaggaagagagtgaccaaactcgtcccggacgggaggagggcaggcccgcccagagggaatcggctgctttaagggaagccccgccccctggtggtgacgctccaccaggcccgtccgcgattggctgcggccagagggcgggatggggttgctaggcgaggaggggatccggcgggcccccgccgcccggagcgctgagccgcgggagcggagccggggttagcggcgctgctggaagatggcgagcggccgggacgagcggccgccttggcggctagggcggctcctgttgctcatgtgcctgctgctgctggggagctcggcccgggcggctcacatcaagaaggcggaggcgactaccacaactacgagcgcgggcgccgaggcggccgagggccagttcgaccgctactaccacgaagaggagttggagtcggcgctgagggaggcggcggccgcgggcctccccggcctggcccgcctctttagcatcggccgctcggtggaaggccggccgctgtgggtgcttcgcctcaccgccggcctggggtcgctaatccctgagggcgacgcggggcctgacgctgccgggcccgacgctgcggggccgctgctgcccggccggccccaggtgaagctggtgggcaacatgcatggcgacgagaccgtgtcgcgccaggtgttgatctacttggcccgcgagctggcggccggctaccgccgcggggacccgcgcctggtccgcctgctcaacaccaccgacgtgtacctgctgcccagcctcaaccccgatggcttcgagcgtgcccgcgagggcgactgtggcttcggcgacggcggcccgtccggggccagcggccgcgacaatagtcgcggccgcgacctcaaccgaagctttcccgaccagtttagcaccggcgaaccccccgccctggacgaggtgcccgaggtgcgcgccctcatcgagtggatccgcaggaacaagtgagtgttgcctgccccctccccgtccgtgtgagcctccaagggccgaggctggttccggcacccagtaggcgctcagacaatgctggcataaggggtggcggtggtgaaggtgaagggagacaccctgtaacggggacagggcccaggccgcgtagcctcccgtcctgctaatcatcaaagaattgcctcctagaggctgtcatttgttcaagggatggctggaggggacactcctttctgacatttctggtccctattcttacaggggcatagaatatgagcgagaagagatcttaaggataacctaggtcagctcacacattttatagataagctgtcaatgttgttatcttatatcaaaagtgcctaatgttataggcgctgtgctaattttttctgtgactgcagtatctcactttattttggccacaacctgatgtcatagacaccatcagttttgcatacggggaaattgagggtcagattggttaactgatttacataggagtgtggctgggacttagaattaggcaatctgattcccgatagtcctcttagccacggagggacactggagcccaaaaatggcagatgatattcccaggatcttccccttgcctatttgacagaagctgatttttctccaatttttacctctgactcagcttaagaagatatggacttagctggagaacttgcacagatctgtgagccgcttcattttagactctgaagggtttgtgatgtcatttgtgcaccttattagcctgggcagaatggctaatggtcacacttctaatacacactttaagtgttattaagcattgcatgaggtttaaaaaattacaaagtagaagaaggaggacctcaagaaattagtataaaacaagagaatgttataaatatttatgaggtatgttggtgtacccagttaaactttacaggaattgttcccactggcaagatgtgtgtgggctgcaataacacggaccatctctgtggaagaggtagagcttgagctatctccagagatgggcaggattttcagcaaaaaggagaggaataaaataagagggaactcactccagatggcatagtgtctgaagtgagcaggcatctcttccccttttctagcatcagcttttccccatttttgtatcttcataaggcttttgaagcaataactgatcattccatctggattaaaagaagatttctgagggactgctaagataaagaagtttccctgcgggacttggaatcatttcttctacaagatttcagtcatatatagaagatctagaaaattcttgagtgttaggacagttcctgagtcttttcgtcttctatcttttactttactcctcttgataagctctcttgtagatatataatttcacatagactttctgggaggatttttttttcttttaaatacgatcgtgtcatcacctctgaacatctgcgtaagaaatatgactttgacatacacttattgacagagctgtgatggccagggctttttggagatgatacaacaaatgcaccgtttgcattgcttaaatgtttaaaatgctctgtccttgcacctttaaaatgctgtgatccttgcagggatgtaaattctgtgcctggatttttcttttcagtattagttgtgctgtgaccaaatatgaaaataagctttttcttggtgcaagtcgccttgaggctatacagagtcattttggtctgtggctgtggactaccctaatcatatctgttcttcaaatatgtaactctcattaatcaaaagggaaagtaggtgatcatatatggtaaagagtacatccatcctaactcagtcttcaagaattcactcaaaatgcgtactctgtgctattaaccaataacaaaggacactgatatgtgaataaaattaaaaacacaagcacacacacaatttgatattgatgcctaaatatagtgtcaactttatggatgggatatttttaaatactcaaacattagtctgtatgggaaaactacctttttcagtgtattttgtgaggtaaaccatttgagtaatttcttgatatcctattcacccagctatattcgaattagatttttgttgttatttcgaatatgtaaaattttaaggcttaatttcctccagcttgggaaaatgaagtttattttctttgtttcactttatacttcatccaatggatgttgagacaaatacttaagaaaatatataaaaaaattaactttatcattcaaatgaagattttatagttgactcctatttttttatagttgaccgctatgcttctttaagtgaatatacctgcttaaattttcataggtaattagcatataaatgatatttgaatgtgtttgtgaaaagcattattacagtgttgagagtgggtgcagatgatttttttgggggcttatgtatacatatctatgattgtctgaatctttgaaatttagtttgtcagatatcaagttatcttaatttttttcaagttatctacagggttacctggatagcgtaatagagttaatttagagattaactgtttaatatttataaactcatttgtaatatctctaatatatttaccagctactttaaatcttatgcaaggaatgatatgtgatactgaagtcaagtatgagaaacatttcagagaattgatttgaatggaaaccataaagtacctgtcaaataagattggagttgatttgcaaagttgatttgacaaaaactcaaagcataatcttacagccattgtagtcactttctcttgaaatcttcattgtaagaatgacactggtactttcaaaactgtgtaattacagtaaggaaaatcgaagtgaattttattactcaagtagattgcaaatatttcattgttcaaaagtatttgattaggccattttgacaatatttctgagaagtgttggaagaaatgttgaacaaaatgagaaacagcattttgtagagaatcttggattttaaagttttacttaacatgtgtaattaaagtagcatgctttacttatttagaatatttaattatccattttattttactagaatatgaatgcccagagggtatttgtttgtttgtttcgctcacagatgtatctatccctggaatgtcctttgggatgtatctgtccctgaaacgtcatttggcaaatagttgacactcaagaaatgtttgttgccgaatggattacctgacctgccccagccttcttataactttcccagagtcagtgggggaaaaatacttaaaaattgttttagaattacaaaccagagagtaaattgttaataccttagctataggggagaggtggttagagtggagttagaaagttagaatatttacttagtttttgtttctgtatcattctattacccaaggactggcagtggaagtggggagtagaatgatagtttgtaaggcagtgtttccttaaacaggatgctagatacctccaaagaaatgaacatttgttgagcaggggctataaagtagtctttatgccagattatgtttcatgtgtgttatcttaattttcatgacaactctgggaaatgggtagcattaatccccattttacaaatgaaaggaaaactgaggttcagcgaatttaaaggcagtaacttctcctgattatgttatattactggtgagcaacagatctgggagacggaatgttcttacccaaatttgtctccaaagcctgtgccattgccactacaccaaatggcattcttctctggtgtctggaagggtgctaattataattatattagtttttagctagtttcttttcatggtctatgctagtgtttaatcagtgtccttattggcaaagatctgtcttctgatgaacagattttgtgttacaagtaattttcattgtttgatcttctctgggataatactactcatcatgcttaaaatagtctttcaaattagacatgataggtttacttttttttcaagcatatagaaaaatcttatatatcaaccccctttagaatttctgtaggtcagttaatttcaacaacagaaaggcagaagcaagaaaatcctatttagaatggaaaaagaaaagtatttaatctctactgatagtaatggtttaagctgttatataagggaaagatgcttaaataggactttagcattttttttgcctttaggttttagcttttaccataaaaggaattcttcagtatttctatatagataagtttgaccaaattgtaaattggttcacttaaaagtagaagcattaaaaaaaatgtttcttttacaggagcagccttgcctccatgtcaatttatttttttaatggcccaatcagaaacattgggccttgaaagagctgcttctacagtgatgtattggaggactagtctttgacatggtgtattgtttttctctgtaagcagctcactgaatcaggttgttttctttgtttgtttttttcctgaatcttctcaactatggcttctctcttgaaaatgtgaatttagtatattgtgaaactggagtgaaacacaaaatatccttttaaaaattagacttcctatcttaaaaattctctttggacggtaaatgtaaaaagcataaaagttattaacctaacatatatgcaatgaatatttatatataccagccatattttctgtggaatttacgtattatgaaatacaagtcgtagactgaactatatgaaattgtcatttttttaggtcaaaaaaatgggtgagggccaggcatagtggctcatgcctctaatcccagcattttgggaggcctggcaacatggcgagaccccatcactaccaaaaagaaaagggtgaatattggcaagctcaaagctcatatagttcaacctaatacatgaatttagaattccctaaataagacatttcctgaaatattaatttatactgtgttatccagctattttttcaatgaaggaaaactctttaaagttagtttaggttaacctgaattgttaaaggtgtttgaaatcttaaattgataatactttctttccattttctttttttgttgttgttagtctccttataacagataacagctgatagagttgttttctaggtctccaagagagatattggagtttatttctaaaagattttgtggaatttttttaatgcatggtgttttgtgtccttttttagtgatacgtgatttggttgtattttcaaaggtttgtgctttctggaaatctgcatggtggctcagtggtagcaagctatccttttgatgattctccagaacataaggccactggaatctatagcaaaacctcagatgatgaagtatttaaatacttggcaaaagcttatgcttcaaaccaccccataatgaaaactggtgagcctcattgtccaggagatgaagacgagactttcaaagatggaatcacaaacggcgcacattggtatgatgtggaaggtatgcaaagcattgagtttgctacattttcccccttgttcgttgaattttgttatgtgtattctgagcaaaaaagaagaaactctgtagaaatctaactttaaaagatatttatttttattttgaaaatttcaaatctacagcaaaattgaaggactacatgaagacctatctgtccttcatttaaattcaccactgttatcttatcccagatggcttgcctctccctctctctttttcactctctacatgcacgtgtatgtgcatgcacacacacacacacacacacacacacaatcacacaatttttttgccaaaccatccaaaagtaggttgcagatttcacaacactttacctataagttcctcagcatgtatttcccaagtacagggacattttcctgtttaactatatactattaccataactgagaaatcaatgataatttaatattatcataccacatgccatccgtaactcagatttcccccattatgtccaaagtagccttggtagcccctttttatccagatctagtatccaatcaaagttcaagcattgcagttggctcttgtaaagagaccgtgctaatagtcctatggaaaaattccataatctagattgtcactttcttcatggtaagattaggtcaggtttcccagcaagactattatatagatcatgttgcgcattatatcaggagacccataacgtcaagctgcaagtggccaagttggacagcttggttaacatgatgaccaccagcaaccaggtctctccatttaaatttaaaatgtatatattttttaagagatagggtctcactctgttacccaggctgcagtgcaatagtacaatcatagctcactgtaatcacaagctcctgggcgcaagcaatactcctgcctcaatctcctgagtagctggaactatagatgtgtgccaccatgctagctaatttttaaattttttgtagagatggggtatcgctgtgttgccgaggctgatctcaaactcctgacctcaagggatcctcttacctcaaactcccaaagtgctgggattatagatgtgagccacttcacccagcccagatctctccattttacataaaggcacattttccttttgtattttaatctgtgaggtgatcatggaatgctgttttttttatttttattgtggtaaaacatacatatatatatacataacatgaaatttgacagtttaactgtttaaacatttttaagtgtagagctcagtggtactaattttcacaatgttgtgcaaccatcaccactatttctaaaacttgttcatcatcccaaacagaaactcggtaggcattaaataataattcccacttccatctctatcccttacccccagccattggtaacctctaatctactttctatctctgtgaatttgcccattttagatattttatataactggagttatacaatattcttccttttgcatcaggcttatttttcttaacataatattcttaagggtgatccattttgttgcaggtatcagaactttattcatttttatagctgaataatattccttgaatgtatatgttagtaatacattttgtttatccatctattgatgagcactgggttgtttccaccttggctactaggaataatgcgtaatgaacgttggcgttcaggtatctgtatgagtccttattttcaattcgtctggatatatacccaggagtagaattgctgggtcaaatggtaattctatgtttagctttgacagactattttccacagtagatataccatttacattcccaccagcaatatataagaattccaatttcttatgaaatgttattttttaaagaattgtttgttgttgttgttgttgttttcagatggaatttcactcttgttgcccaggctggagtatagtggcatgatcttggctcactgtaacctccgcctcctggcttcaagtgattctccagcctcagcctcccaagtagctgggattacaggtgcctgccaccaggcccagctaattttttgtatttttagtagagatagggttccatcatgttggccaggctggtctcgaactcctgacctcgagtgatctacctgtctcagcctcccaaagtgctggaattatgtatgagccaccgtgcctggcaagaattgttaatacaagcttgaactgtttaccttttctctttaaatgctatgaaaacagctattactctttttaaactttaggtatgctttgaataataacgtttttgtttttatgcacagatgtagatgtagagggaacttagaaggaataagtcaaccaatggaaatgtcatcagtgtaaattttttcttttctaggagtctgcccatgatgaaatgccttaggtcttccttacctttttattggcagtcacattataaagtgtcttatgacatgtctcttaatgtatatttaaacctttgaattactcttttactttttatatcaagccatatgtacccaaaatgggtcataagtttgagaatttaatactttcgttactggatctttggggtattgcttttctggttggaaacctctgtgcctggtggtgcctttgcccaagttcttgtcctgcatccaggaagaatgaggtatgcagacaagtggagggtgagcaagacaaagaggagctttattgagctcagaggagaccggcagtgggcatctcctctctgtaggcaggtcacccagtcaagtgttcagccctcagcacaaaggaaccctggagtgggtggcccctctctacaggcaggtcatcctgatgagtgttcagcttcagctttcagcagagaggagctaccctctggttgtcccatcatctctccatcctctgccttgctctgactgagcccagggcttttatggacctcagaggggaggaagtgtatgccgattggttcatgggcgccacgggcagcctggaaaaggcacaagtccccactccagtctatgggactggcagcctggcccccagccttcaggacctccctggcctgaaggtggggcctcaccagggaccccctcccttatacccaggagctagtctgcctcttgctgctttccatggcaccccggctgctcgtgctaaggggcacctgcaagccagtgctgagtcgccctcagtccccaaccttggttccctcttccatgcttgtcagtgcccagtccggtgggggcccaggcaacagggcccaagcatgtgcgtacccctccgggcagtgacagtgcgccgcctcagctccaaccccaatcccggataggagcagacgcaagaatggggagaggccaggcagcaggagcaggcatctccaagcctgcaagggtaaggggggcctaggaggtcgggggacgcagctgctgccagctcccagctcccgccgactcagtggagcatgcagccccagccgtgccccctgggagcctgtggcgggtggctcctaatcctcgctgggcctgggccagtgtctgggccaggggcgacattgccacaagcttccctgttgccctggggctaaggagtggcccggagctgattgcgggcctggggccaggctgtcaggagtgtcaggctgggaggtcaccccacgtgtggcggacactggggacttggccccaagtggcccgcgcagagcctcctcccgagcccaggaacccgggacccttagtggggtgggcgcagtggctgcacttctggccagatccccaaagctggagcagctcctgctttccgccccgcccccgaagcacagccccagctccgcataggggttcctctctgcctgactacattactcccccgctgtgctgctctgggcctgaccccattacggcagcccccagggcagcgggctctggggggtggcagcgggctgtggggggtggctgcagaaggggtggctgtccgcctccttcccgcaccttccggcctgctgctgctatcactttctagaattttctgatcctcctatagtttctaccagtgtttcttgtatatcagaagcattcaaaaagaggtttgacatactatttagaagtgaaaccttctccccataacaattagaggtgatttgaaaatcattaaaaatttttttgtagataatggacttactttaatgtgtaatttttacatttcagtccttgggaaatatatttaataaaacctaactttgaactggtggttttgtaatctagtcaagttgcttcattaatttgagatgatgttacttaaaataatggggtaaatacttaactttgcctttttggaaaaagttgtaaaaggttagaaagtaatttctaactgacaattaattgaggaaggtaaatgtatctcatactacttaaaaaataaatatccggcctctacaaaacgtaggtgtactttggtattaaggccagagattatttggtgaagctagttatcatcagatttttctgattattcagacatctgaagaagctacattatgctgctgtcatttttattttcatgagcatcaacttttctcttgtttcagctgaatgtcggatatgtcctatgttatttctacaataactggcttatttctcttcgtacctcagcaaatattgagcagtttccccttgaagaggaggctgtgatggttttagtttcaacagggtgaattcattgtgtttagtgagtaagatgttgtgaaaccttgtgactaggcatatattcaaaaaacccggatgtcctggagtaattttttttttttttttgagacagagtcttgctgtgttgcccaggctggagtgcaggcgtgatctcagctcactgcaacctctgcctcctgggttcagatgattcccgtgcctcagcctcttgagcagctgggattgcaggtgtgtgccaccatgctggctaattttttgtattttaagtagagacagggttttaccatgttgaccaggctggtcttgaattcctggcctcaagtgatctgcccaccttggcctcccaaagtgctgggattataaacgggagccacatgctcagccgagtaattttactgatgttctatgtgatatatttaggaattctagcttaaagaagtatagacctttagagctgaaagtgaatatattgatttagtccaacccttttgttttagagaaaatcaaggcctgagagaggaactaacttgtgcaatataatgtattaatatagcaaatatttactgagttcctgccgtgccacatatactgtattaggtgatgtaccggtatacagtgagagcaaaacagaaacaactcctgctctgaggaatcagatagtatattagtagtgtggaatctggggtgatttgggccctagtgcctttgccttcattgccagggctggcccagcatatctagctgcctatgtgggtgagccttgcttcattcaacatgtctcacaaacctcaggatccatttaggaaatggctatcctaataaggctgatgaatagccacatccccttccaaagcctcgttattgtgagacctactctggacttgttcatggagtaagatgcctttttttttttttgagatggagtttcgctcttgttgcccagggtggagtgcaatggcacaatctcagctcactgcaacctctgcctcttgggttcaagcgattctagtgcctcagtctcctgagtagctgaggttacgggcatgtaccaccatgcccggctaatttttgtatttttagtagaaacagggttttaccatgttggtcaagctggtcttgaattccagacctcaagtgatccacctgcctcgccctcccaaagtgctgggattacaggcctgagctaccgtgcctggccgcctttttttttttttttttttttaatcacagtgcgctgatttgtatgccatttgcctaccgttctttcttcacagttttgaagacattgtaaaaatcatatgatgttttggtatgtttattccaaagcagatttaataaaaactgaactgtagttttaggtcaacttttaagccatggcgtgtgcttgtagtcgcagatacttgggaggccaaggcgggaggatcttgagttcaagcccagcctgggcaaaataatgagaccctgtctccaagaaaacaaacagacaaaaaagaattgccttctttcaaattatacaatttaaggaagggcaggcaacgtatagttgaaattatttgatcaaagatcatagttttatgtaacttttagaagttttcttgggcagaacattgttatattttattttcttgcagatagaagaacagtagaaggcagtgcaatgtagtggcaaagagagagctttggaatcccgttgccttaggttggaatcacaactctgccttgactagctgtgtgcgtgtgtgtgtgtggtgtgggtgagagacaaattaatgaatttctctaagcctcaattcccacttatataaaattaagataaatactatctactcacaagattaggaggctcaagtgagaatgtgtgtaaagcactttagcctagcatctggtgccatggctacttatatctactagagtttaaacttactcttgaagatagggactttgttttattccattttctatttctagcacacacaaccatgcctggtatatataaggtaaataatagtctttttggaataaatgaatttttgccatccgaaacataaatacatagttatttgatctttggataatcttttttttttttttttttggagacaaagtctcactctgtcacccaggccggagtgaagtggcgcaatctcggctcactgcagcctctgcctcccaggttccagcgattctcctgcctcagcctcccagttagctggtgttacaagcatgcaccactacgcctggctaatttttgtatttttagtagagacggggtttcaccatgttgaccaggctgctctctaactcctgacctcaggtgatctgctcgcctcggcctcccaaagtgctaggattacaggcatgagccactgcgcccggcctaaaatcttagatctttagttaatcttataacaatttataaaaatattcttcctagttttgctcctactctgagtaaataagcttgccttactggtagatcctagatcagtattatttgaacttttttttcttacttttaacctataatatgaaataccttttagttgtgtatgtacatttcatatatatgtgtgtacattaaaaaatttcatggaacaatacttttactatacattctggtattatttcttttagtttgttctatatcattctttaaaaaatatgtctgaacccactaatatatctcacaacccactaatgcatgatgaccttcagtttgaaaaaacactattcttgatcaccctgtggtagaattcatttattttcaaattctaagtaggaacaaaacaccttacaagttgtgtgtgataacttattatttgggtttttcctcccaacttgtttatatgtttcagttatttgcagtgaggactgggccacagatatttatctcagatgttctacttttagattgctttccctaaaatacgaatgagtgttgagttaggaaattggtcagaaatatagttgtcaggcctatgtattgctcatgtgagtctatggattctattattagttaggacagctgccataaagctttatatttgtcttcttaagccactataaacttgaggctgagccttttcaaactagtaattatgattgttttctcctctggaagaagaataaactgttctttggatttatcaaattttcttccctctccttttatacaatggacagagttatgaaatgtggccagaaagcatataatgtaaccaattcagttttttgtgtgaatatcaactccttttatcatgcagacaactattctttccccaaactggaggtcagactgagcagtagcagtgtgctttaaatattgaagtatgtttggctggaagtagattgttgatggaaaaggaagagcatggggaaaataattacccacctgttttcaacaatgctgttgaaagtttagatttggtccagaaatggaccagaaagcttatttttgaggagtattttctgtgtcattaaataggatattatgaattaacccagtaacaccagaaaattgtaatctaaaacaaaaaggaataagatgaacagtatgtaactataaaaatacaatatctgatattaagaaacagacaaatccataaatatagtaggaagtttaaaataggcctctttcagaactagtaggtcatagagatcataactgttagatcacaaaaatgtgagtaaggatacagtggatttgaataacataaataaaccaatctgacctaatgaacgcgtacagaatactgtccttatatctaattttcctgcagagtctgtttactaatttgaggtgtggatgactaagaaaccagctgtcacgcttagggaagatgcatctggttctgttagcgcttgtgttactttgtttttaagattatatattaaaaactaaacaacaaagatacacaggtaaaataggcccaggagcagtggagcacacttgtaatcccagcactttgggaggctgaagtaggaggattgcttgaggccaggagtttaagacctgggcaactggtgagacctcatctcttaaaaaatacaaaaattagtggggcatggtgatgcacccctgtagtcccagctacttgggaggctgaggggctgaggcagcaagatagtttgagctcaggaatgtgaggctgcagtgagctatgattgcaccactgcactccagcctttttttttttttttttttttttttttttgacaggggaagacccgtgtcaaaaaaaaaagaaaaaaaaaagcttataatacagggttcataggatcaagtctaatacttcttagcatgggagcgaagatcccacagtctgactcaagcctataagtttagcctcagctcctacctctcctctgccaccggactacttgtccttcccaaatgtgaaccttcacatgttaggctatcctctgtctgaagtgcttttcaccagtttagctgtaacctcttctgaaacctctcctataataactgtcactatcctaccttcgagagctttttgtttatacagtaccatcagtataatacttatccacttatgttgttaatagtttttttgtttcctgttagtgtgtgaattctttgatgataaggacagtgtagtgctattcgttttggagttatctttgtgcaaaatgtattggcaggaaagagtcctagaggagggaaaactagagaggtgtttacagtcatctgggatgaggtctctttggagataagggctttacctagagggcatgtaggggaatgaaaagggagtataagatacatatataagaagttatgcaagaagaactgcagaattgaccatcgtttaaatagcagaacagaatgtcaaagagaggatgtcaaagatatgactttgaggattttgagcttggattagaaagaatgggagtgggaaaaactaattggatggtggggattgggagacagcaagcgagtgagcatgtgtgtatgtgtgtgtgtgtgtgtgtgtgtgttcgttcaggtgaaagaggagtgaaaactggaaatattaatagtacttgatgtactagtcacaagtacccaatgggcagttagggaataggttctagagcttgggagagaggtcaagatgagaaagagatttagaagttttgagacatttggaaagcatatggcagtgtagatgattttgaaaattgaattaatagtgttttctggcataatttaattgcgtggagctagaagttcaaccagaacatatatataaatgaacagatgggtgctttttttttttttttttttttacctctaaagtgaatgcatttcgtactgggatgttttccttaaggaatgccaacaattcagatattaattctcagcctgatcatattttaaaggtacagttgataatcaaatgtgcattagtaaagtgcttttggtcttacctgatcttgcacattaaagacctggttgaggctttttcttccctttattttctcttttaaaatctgagtgctgcctaatttaaaaggaaagcaaaaaggtaaaacaatactccaaaacagaatatttgcttggagtcacgagttggctttagtaaattgaagcataacctagtataaagactgacctttaggagcagtgcagttgtgtactttgtaacgtgataataggcctaaatgaagagaacctaacactcctttaggatttggcccccagtctttagatctaatgtgtataaattggatgtacttttttcttttccttttttcctgtttaactcaggtggtagagaatgggagagtacatttaaaaaaaaaaaaaaggaaaatacagttcaaagagctatgtgggagacagtgttaaccaagttagacaaaaatgaaaacagatgtaggactgtgtaatttagtttaactctgtagaatcatatcattagcaaatatatattcagtgggagtggtgaaggaaatagattttcacaagataggttgctcagaatacaaagaccaggttcagttagttaagatttgatcaatgtgaacttgaatttaaaaattaggaatttggggaatttttttaagagcaacctctgatttttccattgatttggcccagattttccacctaaaatttttttacaaacgttatgctcattagcttttaaaaatatctcagaaagtacaaaattatcacttaataactcacttattgcctataaaaaattgttcaggaaattcaaagtcgtgagagaatttctcactatccttcaaagtagttttaataaagtaatatcattaagctccaagttgaaatatagggtagaaattgtctgtctatattcctagactttaaaatgcttttcctatttaaaaaaacacattgtagtttccttgtaaaagattaatagggttcttgtgtaatgcagtttgacactttatagttggcctgcagaggcaagtaaaaaaaaaaacaaaaaaaacttgctatgtttcttaacactgaagcattggctgtattttttcttttggctttctgtttgagacagaagagtgaatctttagtatctttgaatgaaggattgaatttattaatctcccctccccttaaaagctagatctttctgtggtgaaaagagtgataagagacttgtttcctaatcaagacggattgagtatcttaaaacacatgaagattagttgtgctacaaatcgattgaaagagtttaatgggtacgagtagatcacttgatcagaagatttagctatccgtaacaattagcattggtattgatcacaatttgcagtattactagacagattcctaatggttacactttgagtcttgttctttgatactggtaaatgaatggtaggtttctttctttcctttcctttcctttcatttcctcttcctttctttccttctttccttcctctctctctctctctcttaatttttagatctcagttttcatacgtattctttcctaaaattaatctgcctgagaaagatacttgctgtggaggttctatctcatattctcttctcccaattgactgaagacaggcatacttttctacccacctgaatcacattatggtgtattgccttggagttttacaaacttccagggcactaaaacaaaaggaacaatttggtgattactttaatggttaaacagtaccataagagcatcacccccaatttttctttgaaagatgtattttcagtaattatttcttatatttactattttattatttaccaaaatttgtaaaaaaaactatgcctttttgataaattgtgtgctagtgactattgtaataattcaatttagaggacacagaattaatacttagagcattacagtcattggaaattaagaaaaatttaaatacactaacatactatagattgaaaaattatagaatgattggtgaaagactttcaagcatgcaggtatatcacattcaaatagcattctgtggaggaagtagaatggaaaaaaagttcaaagagaaaaagagaagatgtggctgggtatggtggctcaggcctatgatcctggcactttgggaggccgatgcagaaggattagttgagctgaggacttcaagaccagcctgagcaacatagtgagatatgtctctacaaaaagtaaaaataaaaaaattagccaggcatggtggtgcacatctgcagtccagtctactcaggaggctaaggtgggaggatcacttgagcctggagggcaaggctgcagtgagctgtgactacgccactgcactgcagcttgggtgacagagcaagactcctgtctcaaaaaaaaaaaaaaaaaaaaaaaaagaagatataaaattccttaaagaggcatgttcaggcaacttttaaatagatatttctagaaatcaaatctctggcatttttatttggatatatttaaaataataatataaaagttttatttaaaaaaaactggtcatggtgcagtggttcacacagtgtaattccagcactttaagaggccaaggtgggaggattgcttgtgcccaggagttcgagaccagcctgggcaaaatagtgagacactgtctctacaaaaaaaaaaaaagagaaaaatttacattatgcaggatattcctttgtttacaactatttaaacttaagatgaaaacttgtgaataccaacttaaaaatttgtgaagcgtcgcatattttttcagttattttagtattaacaaacaaattgaagatcattggtttatataaccccctgagagactaatagtagaatagaacagaataatagaatagaatagaacagaatagaataatagaatagaataataatagaataatagaaactcgcttatttatgattgttaataagtaggataaattgcagatcatttatactattaaagtgctttattgctttgaggtgtgcctgtaactgaatgttttacttccaaaattaaaattttctttggctgaataaagatattctgaaacctgacatttctcctttaatctttgttgagccaaatgacatatcaacttaaaaagataagcaaatatattaactgaatctggcagtagctgcagctgttattaatgtcaggcctatctacagatcagtggctgctccctgtttgggtgaactctagctttgggtaagtaggttttgtgttgagaaaaaaaaaattaagacaacaaacctgaaccagctacttagttaggattacttattatacagtctttgacatttggtttcagaaaaataaatgttaagtttaacatagatggcaaataatgcctatctgtgacatctcacaaaaaattcttgaattattcataacttaatgtccccatttggttccatgttttaaaataattaaaaaaataaatttaaaaataattttaaaaataaaaaaaatttttttaaataattaaaaaaaaattcctaaaccaaaacttgaagttgatgaataaagacgttttgatattctaatgctaggatagtttatctttttgtcttatgaaataaaaattagtttgctactcttcagacatttatgagtttgaagaagataaaggtagacatcacaactcattaattgccttctgaaaacagttcattattatagactcagaggaaacgtgctttacttttatgagattgtatcaagacagagataaatattttataatatatttatgttattgatttcaatataataacatcgtggtcagagaacaccctttgtatgtaagtttgacctaggtcaaacttaaatcatacaaagtttgacctaggatatggtcagacttggtgcatgttccatttgtacttgaaaagcatgtgtattctgccattgttgggtggggtatagtataaatatcatttatagatctagttagttgatagtattattacatttttctctatcctttgctgattgtcttttctgctgattactgagagaagaatgttgaaatgtgcaaccaaaattgtggatttacccatttttccttttagttctataaatttttgttttatatatttcaaaattctgattgttgcatgcacatctagaattatgtcgttttggtgaatctacacttttatcgttatgtaatgtccctctttatctctggcatttttccttgctctgaagtctattttacctgatagtcatatagctactccatcttttgatttgtgtgtgtatggtgtatttttttcctttcttttaacttacctataccattatatttaaagtgagtttctgacctggtgcggtggctcatgcctgtaatcccagcacttttggaggctgaggcaggtggatcacttgaggtcaggagttcgagaccagcctggccaaaatggtgaaaccccatctctaataaaaatacaaaaattagctgggcatggtggcaggcacctgtaatcccagctactcgagaggctgaggcaagagaatgcttaggaaaccgggaggcagaggttacagtgagccgagattgtaccactgcactccaacctgggtaatacagcgagactctgtctcaaaaaataaataaataaataataagtaaataaattgtgtttcttgtagttgcatagagttgggccttgttttttaatgagttttacaattcctgtcttttagttggtgtgtttgcaccatttacactgaatataattattgttatgtttggatttaggtctactttctcatttttcagtttgcctctctcattttaatcccactgcttcctttttcctgccttctattggattgtgttttcaacgatatcttttagttgctctagtaaatacaagttactacttaacttttcacagttctacctaaaattaatattttacttcaagaggaatgtacgaacctacccaccataccctttatcctccccttttatgttgtacttaacttatatatatatgctgcactgaaaaccctactagacaatgttataatttttactttcaactgtcatacacagtctaagggacttaaggggagaaaaatagctgattgtatttaccatttctgttgcttttcattcattcctgaagttctaagtttctctgtggtataacttctcttctgcctgaagagccttctttagcatttcttttaaagcaagtatgcttataatggattatcttagttttccatctctgagaatgtgtattttgccatcattcttttttttttttttttttttttttgagatggagtcttactctgttgcccaggctggagtgcatggcgcgatctcagctcaccgcaagctttgcctcctgggttcactccattctcctgcctcagcctcctgagtagctgggactacaggcgcctaccaccacgcccggttaatttttttttttttttttttgtattttgtatttttagtggagatggggtttcaccatgttagccaagatagtcttgatctcctgacctcgtgatccgcccgtctcggcctcccagagtgctgggattacaggcgtgagccactgcacccggccttgccatccttcttgaaggacatttttattggatataaaactcggggttgtggattgtagtttgttgtttttgctgtttgttttttagagtgctttaataattttgtgccattgccttctggcctccatggcttctgctgagaaattcagtcatttgaatttttcttcccctttatacgcacatcatttttctatggccactttcaagactattttattgctgctgctgctgctgcttctgcttctgcttcttctgcttctgctgctgcttcttctccttctccttctcctcctccttcttccttctcctcctctttctcctcttactcctcttcctcttcctcctcttcttcctcttcctcttcttcctcctcttcctcttcttcctcctcttcctcttcttcctcctcttcctcttcttcctcctcctcttcttcctcttcctcctcttcctcttcttcttcctcatcttcttcttcttcttcctcttcttcttcttcttcctcttcctgttattattattgtgagacagagtttggctgtgtttcccaggctggagtgcagtggtgcggtcgtggctcactgcaacctctgcctcccaggctcaagctattttcttgcctcagcctcctaagcagccgggactacaggcacgtgtcacaacacctggcttatttttttgtattttttgtagagacaggttttcaacatgttgccccagctggtctcaaactcctgggctcaagggatccgcctgcctcggtctcccaaaatgttgagattacaggcatgagccattgtgcccagctgactttttttctgtctttggttttcagcagtttgattataaaatacccatgcatggatttttttgcacttatagtgtttgagatttgctgagcttcttgaaatgtaagtttttgtcttttgccaaatttatggtgtttctagccattatttcactttttttttttttttaaatagcatggcgccatttttttttctctcctgagactccagtgataacaatagtaggccttttgctattgttcttaaaattttttcttcttttttttcagatctttttttcttctttctctgttattcataaggcaatttctacttacccatcttcaagataactcactttttcctatcatttccattcttccattaaacccattcagtttatttttttaatttagttactgtatttttctgaaattctgaaatttctacttttttctattttgcatgtttggtatctttcttttactttaagactgtttaatcttacttccttggaaggctgggcgtggtggttcacacctgtaatctcagcaattcgggaggccaaggtgggtggattacttgaggtccagagtttgagaccagcctggccaacatggtgaaaccctgtctctactaaaaatacaaaaattagctggacatggtggcacatgcctgtaatcccagctactcagaaggctgagggacgagaattgcttgaacctgagaggcagaggttgcagtgaactgagatcgtgccactgcactcaagcctgggtgacagagcgagactctgtctcaaaaaaaccaaaccaaaacaaaacgaaaaccttaattccttgtaacatggttataataactgctttaaggttagtctggtaattccagcatctgtgtcacattggagttggtgtctgttgactttttttctttataatatattgagcttttactggttatttgaatgtcaaataattttggattatatcctggacattttgaatcttatgctatgagatctgggtcttgtttaaatcctattaaaacataatacttgttggctgggtgtggtggctcacacctataatcccagcactttgagaggccgaggcgggcagatcacctgaggtcaagaattcaagaccagcctaaccaacatggagaaaccctgtctctactaaaaatacaaaattagctgggcatggtggcacatgcttgtaatcacagctactcaggaggctgaggcaggagaatcgctttaacctgggaggtggaggttgcggtgagcagagatagtgccattgcactccagactgggcaacaagaatgaaactccatctcaaaaaaataaaataaaataaaaataataatacttgtctgtttgtgccatcagggaatgacccagttaggttcagctgcaagttttgactcgccttatgtaagctgtaattccaatgtcagttcagttttcaaagcctttatagtgctattcagatctgtactgtatgtgcaccactcaggggccagtctgggtgctgggcagtaacctgttttgtagttcagttctcagtgcttttggtgtgctgtttaaggtcagacctgtacatgtgcagtttagagatgatcccaggtggtcacaggcaattttatgagatccctttctcacattccctcatatctgccatctcactaaagtctctgtcttccagggtctccagtatagaagataaataaagacatgaaagatctcctttcatgggaaagaaaggatgtgcaatatcatttgttatcagtgaaatacaaattaaaaccacaattagataccactcgtcttccactagaatgcttaaaatttaagagactttccagtggcatgagcaacttgttaggtgatgatgcagaataactaaaacatggatacattgctggtggtaatatgaatatggtacaaccactttagaaaacaatttcttacaaagttaaacttactataagatccctccatgccacctctagatatttacccaaaagataggaaaacatatgcccacattaagatctatgcacagctttaatcaccaaaaaacaagaaacaactgaaataaccatcacatgatgaacagataagcaaattgaactacttttattcaatagaatacttagtaatgtaatggaccatttatatatgaagaatatagatgagtctcaaaagcattatgctaagtgaaagaagcctaatacaaaaggctatatactatatgattttatttatatgacattctagagaaggcagaaatatagggaaagaaattagattaatggtaacccagggtctgggaaccttctgggatatagaaatgttctgtatttttattgtggtggtagttatgtgactgtatacattgcactgtacatgtaaatgggatgaattttatagcatataagttattatacctccataaacttgacttttaaaaaggctttaaagcaccgtgttaactagattgtcaaaattcttttgaatcatttacttaatacttaagtgaaaggaaattatttaagaacctctgtatgcttcaaagaagaataaaattcaaagtatcatgcaaaaatatttgccttgtatatgccgttttataaccttttttgatgcatggtaaatatcgtgacaataaatatatgcctgcagtaatttaaatggctgcatagtagcccattttatatcataatttactaaactggtctttcatttttgaacatttagattgcttccagttttatgctctttcaatttgaatactatagccctcatccttatagctattatcttggaataaatttctagaaaaggaatttctggttgaggtcatacctattttaaagattttatattcatattactaaattttcacccagaaatgttctataatcctttgtcatctcttttttttctttctttttaatgaaagacacttcatctttcattttctttaaaatttctgatggcagctttttggccaacagatattttactagctttttggtagttgaatctgttaggtagttaaatcttttaggtagttaaatctattcatctattattcctctcatggttttatactactttgttgtcatacttagaagggctttcctcattctgagagagtaaaaacatttatgttggcttctggtttcattaatggcttcatttttatgttaaattccatatggattaaagagtttacttggtatgatactgtaaaccaaaaagtatctgtctctaagatgggtctcaatcaatttagaagtttattttgccaaggttaaggacatgcccggaagacataaatacagtcacagaaaccgtctgtggtctttccctttctccaaagatgacttttgagggcttcaatatttaaaggggaaaagtgagctggaggggaaagagtaaaggtcatccacatagtgcaagagaaaaggagcagttgggggaatagtcaattatgtattcatctcatgctcagtaaatgggcacttttcatgagataaggtgaacatgaaagagctacctgtggagatatttacccctttatctgtagctatctgcttaggaacaaaaggaaaggcagcttcttgcatgactcagctttcagcttaatttttttcttttggcatagtgaattgagtgaatttggcatacctttcacaatatgatgtaaaactccaccagtattttttgccacctagttaacctagtcaaccacttttaaccatgtaagagttactaattttttcccccattggttttaaataccttgatcatattccaaatgcttttgtttcagttactgtgatttctatgttgttccgttggtctctttatttttatacctgaagtgaactgctttagtaagtgtagttttattatatgtattttagtaatatggcaatgcaggtcccctcttaaaccactcttattttttaattttttgggagatattctcagccatttctcagaaattctcacaaagttactggtacagtttaacttctaaatcattatgtccagttgcaacaaaaaaatctatgttttcataatatttataaattaatttggggaaatttgatatttttataagcctcttatctagaggcataatacactttactaaaatctcctacatccctcagtagcattttataatattgatttatattatgcattttattatacttcatcctatacattttgtgatttcgttgctggaaactttttaaaaattatatttgctgattattgctgaaatacagtaaaaaatattgatttttatattgtttttaagtagtcatctttttatttccagtgtcattttacatgactttttatttaacttaaatatggtcttatcaaagaaaaatttggggactgtatgtcaggattcaactaatattttctatttccattagattttacactgtgaagctaatattaaaatcagtctataagacctaaaataaaagaggcttgtctccatgaatctgacttttagtaattgtttgtagagatatatattaaaaagtcaatatttatattatatgctctgtcaaactaaggatgctaaatgtattttcttctcttggaattaagtcttattttaaaatgatttctgtccttcctccctacttgctacctgggggatatatttgtatgtgtcattagatggaattcacaagttatggtccaattaaagttacctttaaaaacctgattaggtaacactctaaaatgttactgtaaacttgatcttcttgctgggtcttagctagtatttcttaaattgctgctaaaataggacaattaagggatagacaaaagaatgctaggactcaagcctggggattatagtgttactctacgtcattgccttctagcataatgaaagtgtgagttggccatgtttgcaaattaacacagctattaaattttacatatgcaaaaaaacccttagattagtttacatttatatggccctgaaattgttattattattttttcttttttattatactttaagttctagggtacatgtgcataatgtgcaggtttgttacataggtatacatgtgtcatgttggtttgctgcacccatcagcttatcatttacattaggtatttctcctaatgctatccctcccccagtaccccacccgcctacaggtcctggtgtatgatgttccctgccctgtgtccatgtgttctcattgttcaattcccacctatgagtgagaacatacggtgtttggttttctgtccttgtgatagtttgctgagaatgtggtagtttccagcttcatctatgtccctgcaaaggacatgaactcattcttttttatggctgcattgtattccatggtgtatatgtgcacattttcttaatccagtctgtcattgatggacacttgggttggttccaagtctttgctattgtgaatagtgccgcaataaacatacatgtgcatgtgtctttatagtagcatgatttataatcctttgggtatatacccagtaataggatcgctgggtcaaatgttatttctagttctagatccttgaggaatcgccacactgacttccacaatggttgaactaatttacactcccaccaacagtgtaaaagctttccagtttctctacatcgtctccagtatctattgtttcctgactttttaatgatcgccattctaactggcatgaaatggtatctcattgtggttttgatttgcgtttctctgatgaccagtgatgatgagcattttttcctgtgtctgttggctgcataaatgtcttcttttgagaagtgtctgttcctttcctttgcccactttttgatggggttgtttgtttttttcttgtaaatttgtttaagttctttatagattctggatattagccctttgtcagatgggcagattgcaaaaattttctcccattctgtaggttgcctgttcactctgatggtagtttcttttgctgtgcagaagctctttagtttagttagatcccatttgtctattttggcttttgttgccattgcttttggtgttttagtcatgaagtctttgtccatgcctatgtcctcaatggtattgcctagattttcttctagggtttttatgcttttaggtcgtacgtttaattctttaaaacatcttgagttaatttttgtatgaggtgtaaggaagggatccagtttcagcttcctacatatggctacccacttttcccagcaccatttattgaatagggaatcctttgcccatttcttgtttttgtcaggtttgtcaaatatcagatggttgtagatgtgtggtgttatttctaaggcctctgttctgttctgtatctgttttggtaccagtactatgctattttggtgactgtagccttgtagtatagtttgaagtcaggtagcatgatgcctccagctttgttctttttgcttaggattgtcttggctatgcaggctcttatttggttccatatgaagtttaaagtagttttttccaattctgtgaagaaagtaattggtagcttgatggggatggcattgaatctataaatgaccttgggcagtatggccattttcacgatattgattcttcctatccatgagcatggaatgttcttccatttgtttgtgtcttcttttatttcattgagcagtggtttgtagttctccttgaaaaggtctttcacatcccttgtaagttgtattcctaggtattttattctctttgtagcaattgtgaatgggagttcactcatgatttggctctctgtatgtctgttattggtgtataggaatgcttgtgatttttgcacattgattttgtatcctgagactttgctgaagttgcttatcagcttaaggagatttggggctgagaccatggagttttctaaatatacagtcatgccatctgcaaacagggacaatttgagttcctcttttcctagttgaataccctttatttctttctcttgcctgattgccctggccagaacttccaacactatgttgaacaggagtggtgagagagggcatccttgtgttgtgccagttttcaaagggaatgcttgcagtattcaaaaaaactggcacagtattcttgtgccagttttcaaagggaatgcttgcccattcagtatgatactgactgtgggtttgttataaatagctcttattattttgagatacattccatcaatacctagtttattgagagtttttagcatgaagggctgttgaattttgtctaaggccttttcagtatctattgagataatcatgtggtttttgtcatttggttgtgtttatgtgatggattacatttattgatttgcatatgttgaaacagccttgcatcccagggatgaagctgacttgatcgtggtggataagctttttgatgtgcttctggattcggttttccattattttattaaggattttcgcatcgacattcatcagggatattggtctaaaattctctttttttgttgtgtctctgccaggctttggttatcaggatgatgctggcctcataaaatgagttagggaggattccctccttttctactgattggaatagtttcagaaggaatggtaccagctcctctttgtacctctggtagaattcagcggtgaatccctctgctcctggactttatttggttggtaggctattattgcctcaatttcaaaacctgttattggtctattaagagattcaacttcctcctggtttagtcttgggagggtgtatgtgtccggaaatttatccatttcttctagattttctagtttatttgtgtagagcggtttatagtattctctgatggtagtttgtatttctgtgggatcggtggtgatatcccctttatcattttttattgcatctatttgattcttctctcttttcttctttattagtcttgctagcagtctatcaattctgttgatcttttcaaaaaaccagctcctggattcattgattttttttgaatggttttttatgtctctatctccttcagttctgctctgattttagttatttcttgccttctgctagcttttgaatgtgtttgctcttgcttctctagttcttttaattgtgatgttagggtgtcaattttagctctttcctgctttctcttgtgggcatttagtgctataaatttccctctacacactgctttaaatgtgtcctagagattctggtatgttgtgtatttgatctcattggtttcaaagaacatctttatttctgccttcatttcgttatttatccagtagtcattcaggagtaggttgttcagttgccatgtagttgtgtagttttgagtgagtttcttaatcctgagttctaatttgattgtactgtggcccgagagacagtttgttgtgatttctgttcttttatatttgttgaggagtgttttacttccaattatgaggtcaattttcgcataagtgtgatatgatgctgagaagaatgtatattctgttgatttggagtggagagttctgtagatgtctattaggtccacttggtgcagagctgagttcaattcctggatatccttgttaaccttctgtctcattgatctgtctaatgttgatagtggggtgttaaagtctcccattatcattgtgtgggagcctaagtctctttgtaggtctctaaggacttgctttatgaatctgggtgctcctgtattgcatgcatatgtatttaggatagttagctcttcttgttgaattgatccctttaccattatgtaatggccttctttgtctcttttgatctttgttggtttaaagtctgttttattagagactaggattgcaacccatgcatttttttgctctccatttgcttggtagatcttcctccatccctttattttgagcctatgtgtgtctctgcacatgagatgggtttcctgaatacagcacactgatgggtcttgactctttatccagtttgtcagtctgtgtcttttaattggagcatttagcccatttacatttaaggttaatgttgttatgtgtgaatttgatcctgtcattatgatgttagctggttattttgcccgttaattgatgtagtttcttcacagcatgaatggtctttgcaatttggcatgtttttgcggtggctggtactggttgctcttttcaatgtttagtgcttcctttaggagctcttgtaaggcaggtctggtggtgacaaaatctctcagcatttgcttgtctgtaaaggatttgatttgcccttcacttacgaagcttagtttggctggatatgaaattctggattgaaaattctttcttttaagaatgttgaatattggcccccactctcttctggcttgtagggtttctgacgagagatctgctgttagtccgatgggcttccctttgtgggtaacctgacctttctctctggctgcctttaacattttttccttcatttcaaccttggttaatctgacaattatgtgtcttggagttgctcttcttgaggaatatctttgtggtggtctccatatttcctgaatttgaatattggcctgccttgctaggttggagaagttctcctggataatatcctgaagagtgttttctaacttggttccattctccccgtcactttcaggtacaccaatcaaatgtagatttggtttttttacatagtcccatatttcttggaggcttttttcgtttctttttactcttttttctctaatcttgtcttctcgttttatttcattaatttgatcttcaaccacgatagcctttcttccacttaatcgaattggctattgaagcttgtgcatgcgtcatgaagttctcgtactgtggttttcagctccatcaggtcatttaaggtcttctctacactgtttattctagttagccattcgtctaaccttttttcaaggtttttagcttccttgcgatgggttagaacatgtttctttagctcggagaagtttgttattaccaaccttcggaagcctacttctgtcagcttgtgaaagtcattctccatccagttttgttccgttgctggcaaggagctgcgatccttttcaggagaagaggcgctctggtttttggaattttcagcttttcagccctggtttctccctatctttgtggttttatctacctttggtctttgatgttggtgacctacagatggggttttggtgtggatgtcctttttgctgatgttgatgctattccttcctgtttgttaattttccttctaacaggcccctcagctgcaggtctgttggagtttgctggaggtccactccggaccctgtttgcctaggtctcaccagtggaggctgcagaacagcaaatattgcagaacagcaaatattgctgcctgatccttcctctggaagcatcatcccagaggggcacctgcctgtatgaggtgtctgtcggcccctactgggaggtgtctcccagtcagtctacatgggatcagggacccacttgaagaggcagtctgttcattctcagagcttgaatgccatgctgggagaaccactgctctcttcagagctgtcagtcagggacgtttaagtttgcagaagttgtctgctgcctttttttcagctatgccctgcccacagaggtggaatctatagaggcagtaggccttgctgagctacggtgggctctgcctagttcgagcttcccagctgctttgttaacctactcaagcctcagcaatggcagacgcccctcccgccatgaggctgcagcctcgcaggttgatctcagactgctgcagtagcagtgaataaggcttcgtgggtgtgggacccaccgagccaggcacaggagggaatcttctggtctgctggttgctaagaccatgggaaaagcacagtatttgggcaaaagagtactgtttttccaggtacagtctgtcatggcttcccttggctaggaaagggaaatctccccaccccttgcacttcccagttgaggtgacgccctgccctgcttcgacttgccctccgtgggctgcacccactgtccaaccagtcccaatgagatgaaccaggtatctcagttggaaatgcagaaatctacccctcttctgtgtcaatcttgtcgatcttgctgggagctgcagaccggagctgttcctattcggccatcttggaagtgactgaaattgttatttttatgtgttctctgttttgcttcctcaccaagactctaaactctggatggaagtatatctgttgtttataattcccaatagtcttagtataatcccttacacacaacgaccattgtattgtgaccaatgtagtagtaaaaattggaaaagattttcaataaatattatgacaatgaatgcacgtgtgtttacgtgtatatgtacaagttaaagttaccaaagatgattataggtcagcaatgactaaaggtgactaatatcataatgactaaatatggcttggtagggataggaaaatcagcatcttacccatttcctgccagactcaaggtgaataagagaaagctaaaagattgccttgccctaggagacaaggttaagaccgagttactaggcttatggtggtcataaacctgcaaatattctgagaagtcaaagtctgtttgacatccccatatggatattcaatgggcatttcaaacttaatgctttaagaacaaacatcttaatttcccattgctccaacctccttttattcatttaacatatatttattgaagggctactatgtggcaggtactgttttagtcttggaatgtccatcaatgggcataacaaagatctctgcccttgtgttgtttataatctggcagggagaaacaggcagtagatagtaaacacagtaggtgaattgttaagtgttgtagaaaaagcaacaaggtagaaaaagggtaagaggaactgggagtgctggtgggatgggcttggggatagtgatggagagatgtaagtagcaacttcaattggggaggtcaggatgacctgactccattgtcaggttgaaattggagcagagagctggggttgagggagttagtcaagtagtaaggttatccgggggaagagcattccagcaaagggaacaagtagagcaaagtcaggaggtacttagagtatcccgtgaacagcaaggaggccatgtgtctgctgcagagccagtgatggagagagtataaaaggaggtttaggaaggaaagctgggtgatggggatcaaatcatacagggccttaggccactgaaaagactttggcttttagtctgagtgaaatacggggagtctctgaactgttttgaacagagaaataacatctgacttgcattttaacagaattactctggcatctctgttgagtaaagaatataaaacggcaagggcaggaacaggggaacctgttaagagcaattgcagaggctgggcgcagtggctcatgcctgtaatcccagcactttgggaggccaaggtgggtggatcacggggtcaggagatcgagaccatcctggccaacatggtgaaaccccgtctctactaaaaatacaaaaatacaaaaaattagctgggcacggtggcgggcgcctgtagtcccagctactcgggaagctgaggcaggagaatggcatgaatccgggaggcagagcttgcagtgagctgagatcacaccactgcactccagcctgggtaacagagcgagactgtctcggaaaaaaaaaaaaaagagtgattgcagaaatacatgcagagaaatggcagtggcttgtacagggccacagcaatggacatgaggatgaacatattttggattctgaacatattttgaagttagagtcggcatggttttctgacactttggatataaaatgtgaatccaaggctttttgcctgagcaactatttaatagaagaatgaaagtgccattaactgcagtgggaaagactgtgggtggagcaggtttggagaagataagtagttcagttttggatatgttaagtttgtgatatccaagtaaagattttgaataggcagttggatgtacaagtctggagtctgggaagaaatctaggctggggacagaaatttgagggttgtcaccctgtagatcatgtttaaaaccacgggactgtatgagtttcattataccaaggaaataagtagtaagagaagaggaccaaaggcagaaccttagggatgccacctctgttgcctttgttctctttcatcttttcagtaaatggcactactatctccctgatttctcaagcctaaaatctagaagtcgtccttgatttcttccttctacatccagacccgtcctctttgtctccactaccaccaacctagtccaagtcaccattatcttctaatacatctccatgcttccccatttgtccccctacagtcattttccatccagcagtcagaatgatcttgacagaatgaaggtaattctaattgtatcacacctctgtgcaaagcctgccagtgttctgcacagcaaacattgtgaatgaatgttctgactcacaaatcactgtgaaatattgtccaacgtgaaacagagtgaaaaggcagcctacagaaaggaaaaaaatatttttttcttagaataaaatattctaataaaatattaaccccctaaaaaggggttaatatccagaatatacaaagaactcctacaacataacaataaaaaacaaataatctaatttaaaaatgggcaaaggacttaaatggacatttctctaaagaagatatacacatggccaacaaacattgaaaagatgctctacatcatgaatcatcacatacccatgttcattgcagcattattcacaattaccaagaggtggaagcaattaaatgtcaattgacagatgagtggataaagaaaagtttgtatatacaaaaaatggaatcttattcagccttaaaaaagaagggaatcctatcatatgctataacatggctgaaccttagggatattatgctaagtgaaataagccaaaaagacaaaatactgcatgatttcacttatatgaagtatctgaagtagtcaaactcttagaaacagaaagtagaaaggtggttgccaagagccggggagagtggcaaaaggggagttgtttataatggatatggagcttcattttttgcgagatgaaaatgttctagggctgggtgcggtgggtcacgcctgtaatcccagcactttgggaggccaaggcgggcggatcacctgaggtcaggagttcgagaccagcctcaacatggggaaaccctgtctctactaaaaaaaatacaaaattagccgggcgtagtgctgcatgcctgtaatctcagctactcaggaggctgaggcaggagaattgcttgaacctgggaggcggaggttgcggtgagccgagattgagccattgcactccagcctgggcaacaagagcgaaagtccgtctcaaaaaaaagaaaatgttctagagctctattgcacagcaatgtggatatagttaacactattgtactgtacatgtaaaaatggttaatatggtgaaatttgtattatgtgttctttagcacaataaaacaaaaaccaaatccctcctgtggttcctactgcacttagaataaaatccccaacttcttgccctagctgccaaagctgtttatgatgttgttttgccagaatccctcgacctcaacttgtgccattcttcctttgtctgttattgtccagccacagtagctttctttctattccttacacttaccaaacttttccccctgcctttgaaatgttcttcccgctgacttttaccaggctagctgcatcttgtttttcagatcttgacttaatgttacctcctcatgaaggctttttataactacctagtctctagttgccaccaatcactagctgtatcacatcactctacttaaattttctaggccgggcgcggtggctcacgcctgtaatcccagcactttgggaggctgaggcgggtggatcacgaggtcaagagatggagaccagcctggccaacatggtgaaaccccgtctctactaaaaatacagaaaattagctgggtgtggtggcatgagcctgtagtcctaggtactcgggaggttgaggcaggagaattgcttgaacctgggaggtggaggttgcagtgagccgagatcgcgccactgcactccagcctggtgacagagtgagactcagtctccaaaaaaaaaaaaaaattctgcatagcacttctcactatctgatatttttcttatttatatttgtttactgtctgcttcccctatgtaagaattctataagttttttatattttagaatttaaagtttttaaattttaaaagaatgttacgagaaagcagggaccttgtctgttttgttcatcaccatatccccaagcacctagaatagtgcctggcatatactaggtgctcaataaatatttgccgaaagaaaactgaacttcctagtcttaaatgatcatttcttgaaaaggactactcttctccccaagctccagacctgtctttttgaattccttcttgggtatttctgtctaaatattctacaaatacctcaaattcaacatgcccctttctgctcaattactcttacagaccttattttttctgttaatggcatcatcattagcccaattgatcaggccagaggtcctctttgattcctttctttctctcaactcccactatctatcagatcctgtcagtatcttgtctcacatctttcccttctcttccacagagttgctaccacatcattttaggcctaattactttttacttgtatcattgtaagaaactgcctaaccgggctttttgcttccaatcccccacgcctttccagaccatactgtcttctattcatcatactacttttctgttcaaaactaacaaatgaaatgccatttttttttatgctttggaaagccacggaaaactttatcctcagcctcctttagaccctacttacctttccagcctcaccattcatgacatccctgcagctctgtgctgctgccctcattctgtggccttatcagcctcatagctggtggtcacatacaccagcagcctccacctttacaaagccattttccctgactgcagtgctcctgaacccccgctccttttggctgacttacagttttatctttaagatataactaaaaaactgcctccccaagaagcctttatagatcttccctcaactccaaaattgaaattagtggcatagacccataatatctctattattaatatcatttttttctttttttttccaagataggtcttactttgttacccagactggagtgcagtggcgcaatcttggctcactgcagccttgaactcctgagcttaagcaatcctcccacctcaacctcctgagtagctatgatgacaggcatgtgccaccatgcccagctaatttttttgtattttttgtagagatggggttttgctatgttgcctaggctggtctcaaactcctgagctcaagcagtctgcccaggcttccaaaatatttattgagcacctactatatgccaggcactattctaggtactgccctcagcctcccaaagtgttaggattacaggcatgagccacctctcccagcctatttcattttttaaattgtggtaaagtatacataatataaaatttaccattgtaactgtttttaagggtacaattcccttgcattaagtacatttacattgctgtacaacattcaccactgtcctctgctatcatatttaattatttatggatgtagttgtcccctcctctgattggaaacaaaacgcttggcgttatttgtaagtgctgaattaacatggatgaacatgaatataatcagatcatctcctgagatgagatgtcatgtcacaagtatccttgtgatcctgcttgggtaacttcaggattgtgttcagttttcttccttgtacttattcaaaatggcattggttagagttcacggagtcctggatttttaaaggttctttgcctaatttcttctttacaagtttttggtgcgtacacttaacctaacttttttgtcttaccaatatctatcctataaatatgccagtgaaatggagcatattgcgttaggtaaggtgtgcatatttcaagaactagatgtgtttcaaagcacataatgaaacttcagcaaaaatgagattaagagtttaggctccaataatattgctgcgattttatttctgtcaaagttttgttatttttgctgtattgtttgcttttcttcaatgttttgtaagccccggttctttgatgaactcctaataagctgtgcttaaaactatgacattgacctttctccagaaacaggtttcagaattgtctgtttttcatgttctctccctgccttttctcttgtaatcaaatcagcatgtttttgtttttgttttggagacagagtcgcactctgttgcccaggctggagtgcagtggcactatctctgctaactgcaacctctgcctcctgggttcaagcgattcttctgcctcagcctcccgagtagctgggactacaggcacgtgccaccacacccagctaattttttgtatttttagtagagacagggtttcaccatgttgcccagactagtctcaaactcctgagctcaggcaatctgcccgcctccacctcacaaagtgctaggattacaggcatgggccattgcacccagcctaaatcagcatgtatttttaaacatcatagaatgcgagggtttgaagtgtcttttgtgatcatctaacattcactttgcatataaataaataaataaagacccatgttaatgccaaagggagtgagtggcagaagaatctatgacggaagcatatcttttggtgctgtcaatgaaagggaaacaaatgcttggcattatttgtaagtgctgaattaacatggatgaacatgaaaataatcagatcatcagttattctccctcctgatctgaaggatcctgtgtgacatcatctgagatgcactgggggttgaggaaagatgacccttaaaatccacatttgtactttccaagagcaaggtgagatcatagagaagttacacccgctcctttctccactttttagtctttatccactaaaaacaagatgtgagaaaatcaagtgacaagaatgatagggtaataggctgtcaacaaaatgagtgtgtgggcttatataggtataaacatggtgaaggtgatagaccatggatgcttagtcccttttaagttccatcttccgtttaacacattttgaaagaatttattgtgtcttattttcccctgatttgtgtagctgtgccaccctagataacagtttttctttttgctcttgccaccttcttgataaaggcaagtacagttagaatcgtaggtacttaataatgcttcggcatgaatatgcttcacaactttgagatgtgtaccctttattttctttctgttataaatcttaatttctttgtgccctacttttcatatctgtaaaatggatgaaatagtagtatctgcctcatataattgctgtaaagattaaatgctaatacacataaagctcttagaacaggtctggtgtatagtaaacacacaaagctgctattattattgttactggtattaactgatatattcatactttttataactgctcatcctattaattaaatgtattttttcactatatattctttttcaatgtatattccttttaatcttccttcttagcctccactatagttcagatgccttctccaatttcaaacaatttaatgaaaagaaaagaaaatttatacatccagagatggctgatttaatttcttcagtcttttggagggtagaattattttccttctgagagtaaacttattttttctatgttacaggtggtatgcaagattacaattatgtgtgggccaactgttttgagatcacattagaactgtcttgttgcaagtacccacctgcttcacagcttcgacaggaatgggagaacaatcgtgagtctttgatcacattgattgaaaaggtaaaagtagatgactggaatgttggggtatagaaacaggattaaataagggagaaatttggatgcatgtgaatgataatctatacagtattagatgtcatttatctctttttattacttaagattataaattatctttaaagattattagattataatctattaaaacatattctagctctgcttcccctgccccttacccccagctctctgctccatagggcttccttttcctatcttggaacacttacttatacaaactgaaataattagccaaatttgtactctcaggttcttacaatgtcatgtgatcatatttgctagtgagcctttaccactatatgaaccatagacatcagtttaatttaaacatcacccagactaatacagcaattgaatacaccagcagttacaccttgttgagaaaattagaaatctggctttgaggagagggaattttaaaagcaccttactagtgtcgagttcagacatatgacttaagtttaaggatttaatacttctgtctgtattttatttaaacttcaagggattgaaaatgttttgggggagagagaagagtcactttattttttagaaattctagtatcggtgcagagagaaattatgcgctcttgccttccaaattcaccgtctctgagcttggattcttgtcttcttaggttcacattggagtgaaaggatttgttaaagattccataacaggatctgggttagagaatgcaaccatctcagtggctggtattaatcataatatcacaacaggcagatttggtgatttctaccgattacttgttcctggaacttacaaccttacagtagttttaactgggtaagaatttaaactatgtagactcttagttaaaatgtcaagtctctgttttatatctgagacagaaatatagtctagtacatgttgtttattttttgtggcttttatttttccttattttctgatttttctcgttttataataagaaaatactattgtggagttttttgtcacatagtctaatagtacaatgggatgtgaagcatagttgtagcattagaggaaggacaatttttaaaacttgaaaagatattcagctgtgtaaagcattgccttaaagctaaccgaataccagagtagaagaaacccattgctctgtaaatgacattttgaagaactgtcttatcagctttctaatatattaaatgaatggtttcccacctcccctggaaagctttctggaagctcactttgataaggatttaattgataacctttaatcttgagctttcctacttgaaaaagaagttggaatgtcagtttgataagacactgcaaagaattgtgtaatttatcccttctttgagtactgtagcagtggttacaatggagtaacaaccacatctttcaacatgttctttcctttgagtgtaatttttttggtatacattctagtgtgtggtacttgagaagatttggtgagagaaatagttgttcaatctggggttctttgtgagataatgtcctaaaactcttaaatttacacatctctctttatttagtttgagttttgatagatcgctaagtgtaagaggatgaaaaggctactgtgcttttataatattaaagcattgtatgtcttaactataaaccatttactttttcaaatttttttttcaggtatatgccattgactgttactaatgtagtggtgaaagaaggaccagccacagaggtggatttttctcttaggccaactgtaacttcagtaatccctgacacgacagaggctgtatcaactgctagcacagttgctatacctaatattctttctggaacatcatcctcctaccagccaattcagccaaaggactttcaccaccaccatttccctgatatggaaatcttcttgagaaggtttgccaatgaatatcctaacattacccggctttattccttgggaaaatcagtagagtcaagagaactttatgtgatggagatatctgataatccgggtgtccatgaaccaggtaattggtatggtcttacacataatttcagtagtgcccctcaaagccatgttcaatattgctatgtttcattcagaaaggtcgcctacagtttgtataactggcattaagaaaacctaactaaaattaaaagaaagcaaaaaagaaaatgtaaccaatcttttcccagaagagaaggaaatccttttgctaacccatattaggcatggtatttaataagtgcatagattagatttattctgctaatagtgttttatttatttatattatatagcatatatatgctttgagcctgctcagacatatgtattagtaaggaagctgctttataagatgtttctgaaggttttttctgcctcctttgccaaaatacatgtttaaaaaattttttagtataggatttatatatgttgcggaaaaaaactgagtccatgatgattaagaaggaaaaaaagccttccatgtaattattttgttttcaggtgaaccagaatttaagtacattggaaatatgcatggaaatgaagtggttggaagagaactgctgttgaacctcatagaatacctttgtaagaactttggaacagaccctgaagtcacagatttggttcataacactagaattcaccttatgccatccatgaatcctgatgggtatgaaaagtcccaggaaggtaaagaatagcatttaattcttaatcatttgatcatcatatagaatgattattttgatggagaagagaatttgaactggttcttttggaatttcttccaattttttttccttttaatttatgattgattttagctcttgtattcttatatgatgatctggtctgttcaacaattaggtgatcaaatttatatatttagtggtgtcttccacttggtaatggttctaatttactagaaatagagtataagacttttataaattgttttattttagcaatagttctgttgacaaagagtcaaactctgtaaaatatttgaagagatttattctgagccaaatatgagtgaccatggcccatgacacagccctcagacccagaggacatgtgttcagggtagtcagggtgcagcttggttttaaacattttaagaagacatgagacatcagtcagacacatttaagatatacattggcttggtccagaaatcgggcgagggttgaaagatttattatcaatcgaaaggaatgtctgggttaggataagaggttgtagttaccaaagtttgatcatgcagatgaagcctccaggtagcaggcttcacagagaatagattgtaaatgtttcttatcagacttaaggtctgtgttggtattaatgctgattgacttttcctgatttccaaaagagaggaggcataatgaggcatgtctgacccccatttcccatcatggcctgaaccagtctttcaggttaactttggagtgccgtggtcaagaggagggaatctgttgagataggccctgcctattgagcggggccttagaattttgttttgggtttacagttcttattaaatcattattttgggaaccttatttcataagtgaaaaaccaaaccagatatctgtctgagtcagtgactctgttttgactctcagttctactccctctgcatattccagacttgctaatttattgacttctcatttctttgccttccctgggcaagcccatctctcctggggcgttatagtgtgggatgggacagcagacccttatgcacaacactaggggagtaagaattcatcttttcccagcccatgatttcttccaggcaatgatatctatcaggcaccatagtataatatggagcctcatgacttattactagcactgacctgaccattgggaggatcagttggtcattagttggtcattagtacccagaagttggtcattagtaccccagaagctcacttgaacaaataggcacaagatcttacttatatatgtatatatttcagatttttccccctaaggttctcattctttgtcagtgccacaagtcccttctacatactccccagacctttctgaaaggtggaactaattacactagtgagccctccagttttctttagtctcttgcaatttttctcattataatgacaatagtaaggctcccactccctattaaaatggaatatgcacagttaagcttaaattgaactttctcctccatcaggttaaacttccagctgtgctcttggctaactttacctttttgtgatcactttaatgtgagcatatcacaattttcttttcatttgctctatttcttacaatgtcttagtgagctttatacaagtacagagaggagtatagagttcctggccaggcgtggtggctcatgcttataatcccagcactttgggaggtcgaggtagatggatcatttgagaccaggagttcaagagcagcctggccaacatggtgaaaccctgtttctactaaaaatacaaaaaattagctggacgtggtggtgcacacctgtaattccagctactcgggagactgaggcacaagaattgctttaacctgggaggtggaggtagcagtgagccgagatggcgccactgcactacagtctaggccacagagtgagactctgtctcaaaaaaaaaaaaaaaaacaaatagagttcccctctgatcagtaatttccactcaacattgtgataatgtcattatatgtggattattgacacttaaacagtgctttaatataatttgtctaattggaatatttttcctcccagattatgagcagagggcaaaaataaaaagataatggttttacctctctgttcaaaatatctggaagagatacagtttttaaacacgcaatgtgaaaaagatgtgttttaactgtaatgcctggccaggtgctgtggctcacgcctgtcatcccagcactttgggaggccaaggtgggtggatcacgaggtcaggagttcgagaccagcctggccaacatggtgaaacctcatctctactaaagatacaaaaaattagctgggcgtggtggcgcacacctgtaatcccagctactcgggaggctgaggcaggagaatggcgtgaacccaggaggcagaggttgcagtaagccaagattgtgccattgcactccagcctgggcgacaaggcgaggctccgtctcaaaaaaaaaaaaaaaaaaaagaggtaatgcctgacaggttcttcctgcctgctgcacaggcaaaacagttcattgagaccatggtatcgcagtaaagagtttaattaatgcaaggccagccacgcaggagaattggagttatcactcaaatcagtctccctgaaggctcagaggttagggtttttcaaagatagtttgatggacaagggactagagaatgggttgattggttggggatgaaatcatagggatgtggaaaacagtccttatgtgctgagtcagcttctagttgggaaccacaggaccagctgagttacaactcactcactggtccaggtgacgtcagctggttgtcagaaatgcaaaagtcagaataacatctcagaaggccaatcttaggttctacagtagtgatgttatctacaggagtagttgaggaagttacaaatcttaacaacttccaaaacaatgactggttatcctttaattacacatacatgttagccaaattcaggcccctcttataatcccaaccttgtgacctttcattagttttacaaaggtggtttagttttgggaaaggttgttatcatccttgctttaagattaaactgtaagctaaatttctcccaaagttagcttggccgatgcccaggaatgaccaaggacagcttggaggttagaagtaaggtggagtctggctgggcgtggtggctcactcctgtaatcctagcactttgggaggctgaggggggtgggtcacctgatgtcaggagttcaagaccagcctggccaacatggtgaaaccccatctctactaataaatacaaaaattagctgggcatgatggcaggtgcctgtaattccagctacttgggaggctgagatgggagaatcgcttgaacccgggagatggtggttgcagtgagctgagattgcgccactgcactccagcctgggtgactgagtgagactccatctcaaaaaaaaaaaaaaaggcggagtcaaccatgtcagatttcttttactgttataattttgcaaagacagtttcataatcataggtgattgataatagcgaagcctgatgtgttcacatttgccttgagttaaggtatctaaagtagtacgtgttggaataaaatataagtgaacatggcttatattcaaatcctttatcatatcatacaggagattcaataagtgtaattggcagaaacaacagcaacaactttgacctgaaccgaaatttcccagaccagtttgttcagatcacagatcctacgcaaccagaaactattgctgtaatgagctggatgaagtcctatccatttgtactttcagcaaacctgcatggaggtatggcaactttatattctactaatcagttcttgttgagagcatttggaaatcctggtggaattttatctgtttgtagtgttatgctttcttaaaatgagtatcctgttactgctcttatggcagacaacagtaaaggtcttttctcattactttttcagccagtgtcctggctgtttctttcctccttctttctctctttttttcctcctcttctcttctccttttacccccatctcttctctccacccctttctcctctcttttctcacctactacttctctttcccttctcttacctcctctcccctttcttctctgtcttgtcttttttctcctctcctctccttctcccccgcctgtccccctactctgttcttcctcctcctctcctcttcctctcatagttcttcaggtattttgtatttatctctcacattgggaacttggtaacatattctttgtcattcataaaaattgatccaaatgtttagttctgttttctccctgaagtttaataaactcttttatgtaaatttagattttgatattctcttttttacttggtatatccttaactgcagcagagtgaccacattctcatgtagtacctgagctcatatacctccatataatttagcaggatggatcggttgaataggatgagtgtcaagattaaaaatcgccacaatgtccaactaaggttgcgaataagagtgaagatatcagtacccaagagaaccaaactgtgtccacacataaactcacttgaacaaaatgttcactcatttaatgtacagtgctcatgtatatgaatgttcaatgtacatgaacgttcattcaggattattcacaataacaaaaaagttgaaacaacccaaacaaccatcatctgataaatagataaataaaatgtggtctgtccttacaatgaatattatttggctcgaaaaggaatcaagtgctgatacatgctacaacatagatccttgaaaccttacactaagtgacaaaagccagtcataatagaccacatagtgcatgattattatttttttctttatcaagttgattatatttttatgaaatttttagaataggcatatccatagagacaggaagtagattaaagattgtattgggctggagtgaatagtggtaagaggtgataggggagtgactgctaatggattttggggtttctttttggagttatgaaaatgttctataactggatagtggtagtggttgtacaaccctgtgaatataaacaactttaaatgggtgaattgcatggtatttgaattacatcagtaaaactactaaaaaaaaaaaagtgacaagtattagcaccaggggcaatggggaagaaatttagtttcaacatttactggaatatccagaagtaccatagtggagacttcatgtcatatagagtagcctgccattttagaatgacagtacatactgatggatatttagatttaggaggttaattgagattctccaaaaattgctttgaaagattgccaatagtagaaaaaagtacttctacagttggtaatcatatattgttctcaaagagtcaaataagaactatgaagttataccctggttggcaaaataaattttttgttttcttttattatattttatgtgtttaatgctatgtttgataaaattcacttatttagagctttaaaaatagtctcataataaatcacacatcatgttggctaaatctggaaagttaataatagttacattccagtgaaaataagtcacagatttacagatgtggtgtccagaccttggcatggtgagaggtaggaatcttcagtcatgcagacatttttctttccatgacatattttgttttctcatcttaaaatccttatttaaatggagtttgaaatcttggcaaagcagtttgaaggagaatttctttgttgctgtacaggagtaaaaaatcctcatagagtccgcagctggagcttgtgaattaagctgataaaagacagattaaaagaaaaaagcatacaaattttatttgatgtttgtatgtggcacaggcaacaggcagtgggggagttcataggaaagacgtgaaaccctcaaaaaagcagtgttaaggacttagtgctcttataacaaagggtaataccttgtggaaaagtgactacacaaaggaaggggtttagacttctaggggtaaaaaattgtgggaaagtgactaggaaatatgcgggggaaactaatgaaagatgagggttattttactaaggtttgtttgtgtcaactcatcttggtgttgactatcccatctctgatggtaccaggaaggtgcctttctcacgggaaatttatgccctaattttaggcagaaagagggagggtagatagcctttcctgcatctgctgtttctcagttgccttcagctctaaataattaacatgctaaagagttatattctggggcagaatgttctgattcctttccctgccatctttataatttagaaggatcttgaaagaagataggggaaagcaatattctttttcataaaatttcaaaaattttgatactaatttttttattgaggtgaagtttacataattccagtggcgtttagtgcattcatagtgttttgcaaccaccccctctatcttgttccaaaacatttttatctccgcaaaaggataccccacacccatttaacagtgactcccctttcccttctcccctcaacctctggtaaccaccaatctttgttctgtctctagggatttacctattctggatatttcatagaaatggaatcctataacatgtgacctttcgtgtctggcttctttcatttagcatagtgttttcaaggttcactcatgttgtggcatatatcagtacttcattcctttctatggttgaataatagtacattgtatatacatatgtatatatcaatatcacatttgctttatccatttacgtactgatggacatttgggttgttttgactttttgactacaatgaaaaatgcttctatgcccattggcattcaaatatctatttgagttcctgttttcttttccccgtgccccccttgttttgaaacagagtctcactctgttacccaggctggagtgtaagtggtgtgatcatggctcactgcagcctcaaactcctgagctcaggcagtcctcccacctcagcctcccaagtagctggaactgcaggcatgcaccaccacacctggcttatttttaattttttgtagagacagggtctcccagtgttgcccaggctgatcttgaactcttgggctcaagcaatccacctgcctgccttggcctcccaaagtgctgagattataggtgtgaactactgtacgcagcccctgtattcagttcttttgggtgtacacttaggagtgaaattgtcatatgataattccatgttaagctttttgaggaattgccaaactgttttccacagaggctggactattttacattcccgccagcaatgtatgaggttccagtttcttcatatcctcaccaccacttattattttctatttttattattatagctgtcctagtgggtgagaagtaggacctcattttggttttggtgtgcatttccacaataactaatgatgccgaggatcttttcatgagcttgttggccatttatctatcttctttggagaaatatctgttcaagtcctttgtccaatttttaattgagtttttgtctttgttgttaagttgtaagagtttttaaatactggacactggacccttatcaggcttgcaaaacattttcccccattctataggttgtcttttctctttcttatgttcttgatgcataaaagtttttgattttgatggaatcccgtatatctgtttttttcttttgttgctagtcctttccgtattgatgctaattatttttttgaggtagactgtttggtagaagtactataaatctttttttgtggctttagaaaattagccatttgaaagatatcttctcacttattcactttgaattgaagaaattagtgtaattttcatttctgttgaggaaattctgcttggcaaattttattgttttctcttctctggcagtattctgaaaagctttatgttaataatccatcttgaaacagacaacatgatacattttcctcttttcccttataggttctttggtggttaactacccttttgatgatgatgaacaaggacttgccacatatagtaaatcaccagatgatgctgtgttccaacaaatagcactttcttattccaaggtaggcttgtctttgaatataaaatgttacaaaattaattcttttatttaaaaatatgctttaaagtcctgcaagactcaggtcaagtgcttccatagttaataaagcatgactttttcagctgtttccgaaaaatagctttttctcctgtttcccacctcacttttgaatacactacatgtctttctccattggccttttatctatggttttagcacagtacctggaacatatacatgtcaatttatttcatttgacaaataagttataagcccagtaaagtaggccaagataagggcttaatgaattatagctctggagccaaatcttgcccaccacctgtttttgtaaataaaattgtattgacacacagccacagctatatttttatatattgtgtgtggctgctttctccttcaacatttcaaagtaagtcagtataatttactatattaacaaactaaagaaggaaaatccagtgatcaaagggcaaagttgggtagtttcaacaaagacttttgcatctaaaaagtctgaaatatttgctttctggttttttacaggaaaaaattgccaaactttagtctaaggtatttaagatcctgtagttacatatagcaaggaaaagcaggcagaaatttctgtattttccaaacttcctatgataaacatggattactcttacaatcgggaatgttaaaatgtgtgtgtgtgtgaaaatttaatttaaaaatcgttcttaggaccaggcttggtggctcatgcctgaaatcgtagcactttggtagggcaaggcaggagaattgcttgagctctcaggagtttgagaccagactgggcaacatagcaagagcttgcctctactaaaaataaaaaataaaaaaaaaattagccggttgtggtgacatgcatttgttgttccagctacttaggaggctgaggtgggaggattgctctatcccaggagattgaggttgaagtgagcttgatcacaatactatactctagcctgggtgacaaagctgagaccctgtctcaaaaaaataaaaattgtcttagaaaacatgttaaaagttgaggcttgtaaactaagcttgttagtttcaatgtttggtgttactactgacttagtattgttattggttatattggtactattattggttataggtaatgaatattattactgtaactctgcactctccagtcacagtcctccatccttccacttttcccattccctcatcctctgcaaatgaatcttgtgagattgttcagagtttctactagaggagtacagctgttcatttcaccttagagaattattgctttctgtttggacatatatgtttttttgaagtacatacgtggagtaataagagaatgtatagtgtcccaaccatcaaaataaaaattaaatggctggattttgcatattttctcatcacattctatgctcattctcatgatttctgcttttcgccttcattttggcttctagttccttatcttctctttgttttcttagaccattaacccttttgatttgatttacctttctctgtagggtagacccatggacataccttttcaatgattctcctaagggtcttgtacacccctttgacataactgctttgccctccagtcctcagtaattaccattatctcttttctccataccaatattacaagtacagcctagagtggtcacactgtcacggcaatttgctatagtccatatgtgtgctctccaacttcagctgaaccctcagtcctacatggcaacatttcctgtttagctacttgactccctggctcagttcccactatggtgattcagagcctttatcctctatctgagcctcctgttccagctctatccctcttattcatagtagatcactttgcattgaactcaagtagaactttgagtaatctgatgtgagttcactaagattctgtcttctcaattgtttctcatgtgtgtcttaacaatattctcctccatttcttgatcccactgcattctgcctcctcgaatcttgtgtcttcatatcttattttataaatgaggaaggtgataattaaactccccagtcttcactcacagccttttttctcttggtcaataagcagctcctctaaaaatattgtcttctgctaaccttagtaagcccccatgaagctaccattcaaagtttctttatttttactcttcaaaacttctcaaaagtagatagtcttgggagacatctgagcagccaaagacaatgatggctatgtgataacctatctcccagggtttttctttaaacaatataaaacgacttaaaaactaccaaattttacacaaaaccacactgttggcatcacaaaagatcctgaaactgcaaaataactgtaaattttttaaaaatcaagaagtctcagcatgatctatcatgcacctaccccaccttcgccccaccacaaggctttgtggtgaggtaaaacagaccaagaaaacttacggagaagacagaagtgggtgccagtgaagggcagctgtgaaggtaatttggaatgaccaccatacatcacatatgcactaaatccaaaaatactaaaagagtaactgggcagattagagctctggaatacagggaagagatttcaaaatgcacacaacttaaaggatctggtgtgatttaatgggataagtacaatttaaaaggagaggatggttacagggagatcttccaaactcatagcttctggagaaggaaaaaaagaggcaaagatagaaatgaagaagtgctccttggcaattagatggtgaatgggaaaaggaaaaagtggggagaaatgtaaggttttacaagacagaaaagaactttaaaatcagaagattctcagctccacccttaccaccaagacaaataaataaccacactgaggtacctggattttgctagaccgacagaaaagtgtaccattaagctaggaataatattaaatgcccaatatcataaaaataaagaggaaaataaagtccatggaaaatgattgcagaaaattaggaaatgaaacttcacatatagacactaaggagaccctaccattagcaaaaaataatcgagaagcagaagaaaactgttcagttggcattctaaacagattaagtatacccaaatatacgttgagaatatgagaaactacctcaactcagatagtcaaaaaataaaaacagaggccaggaaacaaaaaacagggataaataaaataaagtttataggactcaggaaaaaaatggaagaaaaagacaaaattatctctgaaatgaagaataaatgacaaaagttagggaactcatacatccaatttcaaacttactacaaagctacagtaattaagacagtgtggtactggcataaagacagacatatagatcaatgaaatagaactgagaacccaggaataaattcttatgttgatggtcagttgatttttttttttagaaaaggatgccaagacaattcaataggcaaagaatagattttttaaataaatggtgctgggacaattggatatttatatgcaaaagaataaactagataccttcctcacaccacaccccaaaattagcttaaaataggtcataaacctaaatataggaactaaaactataaaactaagaaaaaataggaatacatttttgtgatttggtcctcctctagatatgacatcggaagcacaagtgacaaaaaaagattgatacattggacataatccagatttaaaacttctttactgcaaaaaaaaactgtatttgtttcctagttctgctgtaacaaaattccacaaactgggtggtctaagacaacaggaatttattgtctcatagttttggaggccagaagtccaaaatcacagtgttggcagggccattctccctctgaaactgtggaagaatccttccttgtttctccctagtttctggtgctttgctggcaaccattggcattccttcacttctaggtgcatcactccaacccttcatcatcacacggcattctccctctgtcttcgtatcccagtttcccctttgtacaaggacaccgtcatattggattagggcccatgctaatcaccttattttaacttgattacctctgtaaggaacttatttttaaataagatcacattttgaggtactgagggttaggacttcaatatatttttggaggacacaactcaatccataacatataacatccaggaagtaaaaagacaacccacagaagctgggcttggtgacacgtgcctgtagtcccagctacttgggaggctgaggccgaaggattgcttgagcccaagaagtagaggctatcgtgagctatgatcatgccactgcactccagctttggtgacagaaggagaccccagcccccaaaaaataaataaatagatgacccacagaataagagaaaatttttgtaaatcatatattttgataaaggtgttatatctaaaatatataaagaactcttatggctaaataataaaaagacaaatcatccaagtgaaaaataggcaaaggatctgaatggacatttctctgaagaagagaaaatggccaataagcacatgaaaagatgctcaatattattagccattagagaaatgcaagtcaataccacaatgagatacctcttgttacccactagaatggctgtaattttaaaaaatggaaaatatgcataggcaaaggtggaaaaattgaaaccttacatacattgctggtggggtgtaaaatggtataactgctttgaaaaacagtctggcagtgctttaaaacattaaatatagaattgtaatatgacccagcattccactgctaggtatatacccaagagaaatggaaacatgtattcacacaaaaacttgtacatgaatatttgtagcagcattattcataatagccccaaatggaagcaaccaaaatgtccatcaactgatgaatgggttaacaaactgataagtagacatacaaaatcatacagtggaatattattcagccataaaaagtaatgaagtaatgatacacagtacaacttgaatgaaccttaaaaacctactaagtgaaagaagtcacaagagactacatattgtatgattcagtttatatgtaatgttcagagtaggcaaacccatagagacagaaagtagattggtggttgcctagggtttggagtgggggtggggagtaggggttggggaaaaatggagaatgctaataggtatagagtttctttttggggtgatgaaaatgtcctaaaatttattatggtgggtggttatacaactctatgaatactaaaaaccattgaattgtacactttaaatggagtcaatgtgtggaatgtgaattatatctcaataaagtggattttgaaaacctaaagaagactgaggggtggaggatccattctgtattcgtatataagttaaaaaaatgagatctaaaagttatataccaagcccggtgtgatggctcacacctgtaatctcaacactttgggaggccgaggtgggcagattcgttgagcccaggagttcgagaccagcctgggcaacatagtcaaaccccatccctacaaaaaatacaaaaattagccaggtgtgtgggtgcatgcctatagtcccagctcctcaggagggtgaggtggaaggatcacttgagcgtggggagattgaggctgcagtgagcctgtgtttccactactgcactctgagctgggtgacaaacaagacccagtttcaaaaccaaaacaaaaccaaaacaaaaccaaagcaaaagagcatgcatataattattacagtaatctaaaattatggtttttatttgataagagagtgatgggatgataagcctataattggcatattaagtttctagatggggatcgtttattttattttgtttttgttaggacagagtcttgctttgtcacccaggctgtagtgcagtggtgcaatcatggtttactgcagcctcaacctcctggggtcaagctattttcccatctcagcctcccaaggagctggttctacagacatgtagcaccatgtgtggcttttttttttttttttttttttttgtagagatgaggtctcactgtattgcccaggctggtcttgaacttctgagctcaagcagttctccaaccttggcctcccaaagtgttgggattacaggtgtgatcttacctgtccctgtttatatattttaaatggttaattctctgtggtagaaaaatgggaaattattctttttctcttcacactttcagtactttttttctgtttcaaaaagagataaatgaagttttgaccatctttcaaagctcaatttcttctaggaaactccccctgccactctcatcagatgtaatctttctctcctcttgctttcaatggcatgcatttgtgtctccatggcagtttttcttacccttcattgagttatcagttggacacctactgtatgctagatgctgaggacacagagacacaaactgtttcaaggaatagtgtattgtctttagggaagagaaaggtgcaactagttgtaatagggtaagataattgtacagagggcagtcagagcacagaggggccatcttattcctgctagcagtcagggaaagctgcttgcttttattgtgtgtgtattatcttttttggacttcaagctccttgaaagcatgaaacgaaagtataaatatgagcagaaattttttttagagaggggttcagctaggttttatattacttgtaattgcgagtaataaatgaagtcaatattttcttacggagcacattgtattttgatttttaaaaatagataagttcagatagtgaaaaatcaaaatggcataaaaagctatacactgaaaagtctcactgctcatagccccaccccactcccacctccacccctcacataccctgttggaagccacttttattattttcctgtatctttccagtatttttttttgatggagatacaaacaaatagaagtaaagattctttttgtttttccaggaaaattcccagatgtttcaaggtagaccttgcaagaatatgtatcctaatgaatattttcctcatggaataacaaatggagctagttggtataatgtgccaggtaaagattcttttatatcaaggccttacaacttgatggcctttctgctttcctagatggtgcttcttgttattatcttttagttttgaggaataataattatttttaaaacatggtttaaatagtttaaaatatttaaataatcttttcaactacttttatgtttgatgtacgttgagggttgagtaagaataatgcactaaaacttgattaaatggttacattttacttctggctattagaaagaatcttacatgtgctaatagaagagtgtaagctatatttgaattcttttttttctttacaacgttactttctttttttttttttcttttctttttttattatactttaggttttagggtacatgtgcacattgtgcaggttagttacatatgtatacatgtgccatgctggtgcgctgcacccactaactcgtcatctagcattaggtatatctcccaatgctatccctcccccctccccccaccccaccacagtccccagagtgtgatattccctttcctgtgtccatgtgatctcattgttcaattcccacctatgagtgagaatatgcggtgtttggttttttgttcttgcgatagtttactgagaatgatgatttccaatttcatccatgtccctgcaaaggacatgaactcatcattttttatggctgcatagtattccatggtgtatatgtgccacattttcttaatccagtctatcattgttggacatttgggttggttccaagtctttgctattgtgaataatgccgcaataaacatacgtgtgcatgtgtctttatagcagcatgatttatagtcatttgggtatatacccagtaatgggatggctgggtcaaatggtatttctagttctagatccctgaggaatcgccacactgacttccacaatggttgaactagtttacagtcccaccaacaatgtaaaagtgttcctatttctccacatcctctcctgcacctgttgtttcctgactttttaatgattgccattctaactggtgtgagatggtatctcattgtggttttgatttgcatttctctgatggccagtgatgatgagcattttttcatgtgttttttggctgcataaatgtcttcttttgagaagtgtctgttcatgtccttcgcccactttttgatggggttgtttgtttttttcttgtaaatttgttggagttcattgtagattctggatattagccctttgtcagatgagtaggttgcgaaaattttctcccattttgtaggttgcctgttcactctgatggtagtttcttttgctgtgcagaagctctttagtttaattagatcccatttgtcaattttgtcttttgttgccattgcttttggtgttttggacatgaagtccttgcccatgcctatgtcctgaatggtcatgcctaggttttcttctagggtttttatggttttaggtctaacgtttaaatctttaatccatcttgaattgatttttgtataaggtataaggaagggatccagtttcagctttctacatatggctagccagttttcccagcaccatttattaaatagggaatcctttccccatttcttgtttttctcaggtttgtcaaagatcagacagttgtaggtatgtggtgttatttctgagggctctgttctgttccattgatctatatctctgttttggtaccagtaccatgctgttttggttactgtagccttgtagtaaagtttgaagtcaggtagtgtgatgcctccagctttgttcttttggcttaggattgacttggcgatgcgggctcttttttggttccatatgaactttaaagtagttttttccaattctgtgaagaaagtcattggtagcttgatggggatggcattgaatctgtaaattaccttgggcagtatggccattttcacaatattgattcttcctacccatgagcatggaatgttcttccatttgtttgtatcctcttttatttccttgagcagtggtttgtagttctccttgaagaggtccttcacatcccttgtaagttggattcctaggtattttattctctttgaagcaattgtgaatgggagttcactcatgatttggctctctgtttgtctgttgttggtgtataagaatgcttgtgatttttgtacattgattttgtatcctgagactttgctgaagttgcttatcagcttaaggagattttgggctgagacaatggggttttctagatatacaatcatgtcatctgcaaacagggacaatttgacttcctcttttcctaattgaataccctttatttccttctcctgcctaattgccctggccagaacttccaacactatgttgaataggagtggtgagagagggcatccctgtcttgtgccagttttcaaagggaatgcttccagtttttgcccattcagtatgatattggctgtgggtttgtcatagatagctcttattattttgaaatacgtcccatcaatacctaatttattgagagtttttagcatgaagagttgttgaattttgtcaaaggctttttctgcatctattgagataatcatgtggtttttgtctttggttctgtttatatgctggattacatttattgatttgcgtatattgaaccagccttgcatcccagggatgaagcccacttgatcatggtggataagctttttgatgtgctgctggattcagtttgccagtattttattgaggatttttgcatcaatgttcatcaaggatattggtctaaaattctctttttttgttgtgtctctgcccggctttggtatcagaatgatgctggcctcataaaatgagttagggaggattccctctttttctattgattggaatagtttcagaaggaatggtaccagttcctccttgtacctctggtagaattcggctgtaaatccatctggtcctggactctttttggttggtaagctattgattattgccacaatttcagctcctgttattggtctattaagagattcaacttcttccacatgaaggtataggtgttttgcttgtatcgcaagcatcaaagtgccctcacatgaacacgttagcttatcaatgctgataagagataaatttggctttttactaggaatgttgcttaccttttgggatctgagctgtttagaacttcttcagagtgactaattttaatttttatcttttaggaggaatgcaggactggaactatttacaaacaaattgctttgaagtgactattgaactaggttgtgtgaaatatccacttgagaaagagctgccaaacttttgggaacagaatcgaagatcactaatccagtttatgaaacaggtgactattcaggagtgaagtatgaaatttctcccgagggtgaaaagatttttgtgcgtacacgtggtttttgtgcagtgattttggaatacactctttaaaatttcaattcattttagtatatttaaccagtttgtatattccaaggtgtttaatatatttatctagaaaattcgtgaatggaaatgagtttatttgtatatgtgaggaaaagttgaagaaaatgattgaacaaggtagtgatattttgctcttaagggttagtggtcactttttacccgtgtttaaaaaagaccagcataaattggatacacacctaatcattggccaagtgatagaaagatgggctgtggagtgaatgtttttattctttttcttgttgccagtgatttactgtgaaatgattaatttccttttgtttggatatgtgtggtggccagtaggtaaagattataagaaatatactaatgttaattaggataatcagactaatactttctgccagtacatttctgcatttttctttttcctgagtggtgtgacataaagtctgtgagttttttttactatatttaaagacattttattctgaaaaattttaaatatacagaaaagttatgactagccaataattattcctatacctagatttaacatttttaacattttgttatatttgctttattttaatgtaaattttatttacacactcacatacacatacatatttttgactgaactattgtaatataaattgcaggtatggtattttacccctaaatatttcagcatctatctcctaaaaataaggagctactacatactatctctaagtgctactgtcctacccaagaaaattaacagtaattccctaatattacctaatacttagtttatatttaaatgtccatatttgtccccaaaatgtaattttacagctgtattttatgaccaggatctagtcaagtttcatgcattgcattggattattatatctctttactattctttgaactataagagtccttctgtttttaaaaaatgccatttccttttgaaaaggccaggtctgttttcttgtagaatgtcatatattctgaaatcatcagaatgtgctaaagtttaaacagtgttatttatattcttcatgataaagagaaacaaagcctatgaaaaattagccttcagaaatattttaatgaacatttacattgaactttactctgaactcctaaattcctgtttgttccatttatttgtgttgacaatctgttattttgaatatgacctcccaagataattagatgatgatgtttattattgaaatctggtgtccttgtacttaatccaggttcatcagggcgtcagaggatttgttctagatgccacagatggcaggggtatattaaatgccaccattagtgttgctgagattaatcacccagtgactacttacaaaactggagattactggcgtctcttggttccaggaacttataaaatcacagcatctgctcgagggtgagtgactgaatgctttgaaatagagtgctcggaggacaaacatggctccattctggaggattattactagaacgttctagagagcctgttaagcaactttgaatggattgctgcgaagtttagggctggttatacctttgactctcctttagtggcagatagagtacacgaaaaaaaaaaaaaggaaagattcctggggtaaatattctagttattgcttagttgactcattgtgacatgcttccaacctggacattaaacaagacattttagaatacacatcaaatcctgatcctcatggccttaggttttttatttaaaaggagagttaggctgaagtaattctacagtcagttccaattcatagtagaatttattggaaatgtgttcaagatagtttttcctttaaaggagtaacagaagtgttagttgatgaagcacaaagaacatagaaaatgcatagaaagaacatttctcgttcttttaatttgctaaatacaggtaagcccaaagcaatgcagtctatttaacatgctagtaacttttttttttttttttttttttttttgagacagagcttctctctatcgcccaggctggagtgcatggcactatctcagctgcctgcaacttctgcctcctgggttcaagggatgcttgtgcctcagcctcccaagtagttgatattactggtgtgtgccaccacacccgactaatttttgtatttttagtagagacagggtttctcttgtagttttcttttttatcttttgataagtatagatgttaccacaggatattttcccttcctcctgctagctaacttatttctgaagagttagtttgaatacccattgaagtaagggtaaaatatgaaagcattttagtcgttgcctttgttttttaatggttttcagatatctagtggtccgtaaatgaatgggttagaacctcacactaatgagtaatgaggtcttttctgtgattcttccatttttggcagagtgttaactaaagcagcaggggatccgagaaacagggtgagaaggatgtgtttggcagagaatgtcataacctagcacctctgcaactttcccacccgtataccctgatagaagacaagtgaatttaagttccaggagacatgggagtatccactacaagcactaaatttcttttgaagccatatatttaatcttaaaaacctaggccaggtgcggtggctcaggtctgtaatcccagcactttgggaggcagaggcaggtggatcacttgaggtcagaagtttgagaccagcctggccaacatggtgaaatcctgtctctactaaaaatacaaaaattatccaggcatggtggtgggcacctgcaatcccagctactcaggaggctgaggcaggagaatcacttgaacccaggaggcggaggttgcagtgaactgagatggtgccactgcactccagcctgggtgacagagcaagactccatcttaaaaaaaatcatgaaaaaaaatccattcatattttgtaatatacccatgtctattctttattaatgtattaaaaataataaattactcaacgttaaaattttgtctctttaggaaactgcaccacatttatcccaaggattcttacgttctctgcacacctgccttcccagggtttgggtactccagctgcaggagtgtggttctgatctgtctcctttatcataggtataatccagttaccaagaatgtgactgtcaagagtgaaggcgctattcaggtcaacttcacacttgttcgatcctcaacagattcaaacaatgaatcaaagaaaggaaaaggggctagcagcagcaccaatgatgccagtgatccaactactaaagagtttgaaactttaattaaagacctttcagcggagaatggtttggaaagcctcatgttacgctcctcctcaaatctggctctggctctttatcgataccattcctacaaagacttatcagagtttctgagaggacttgtaatgaactatccacatattacaaatcttaccaagtaagtgtcactttctattgtctttttttttttttcaagacagtaaaatcagcattagccatgttgaatagttgtaatttatatagaaatatttgggaacagaatgtacagagagttggagtttacttattttgcaacatgtatttgcttggagatcttttttttttaattatgctttaagttttagggtacatgtgcacaacgtgcaggtttgttacatatgtatacatgtgccatgttggtgtgctgcacccattaactcgtcatttacattaggtatatctcctaatgctatccctcccccctacccctaccccacaacagaccccagggtgtgatgttccccttcctgtgtccaagtgttctcattgttcagttcccacctatgagtgagaacatgcagtgtttggttttttgtccttgcgatagtttgctgagaatgatggtttccagcttcatccatgtccctacaaaggacatgaactcataattttttatggttgcatagtattccatggtgtatatgtgccacattttcttaatccagtctatcattgatggacatttgggttggttccaagtctttgctattgtgaatagtgccacaataaacatacgtgtgcatgtgtctttatagcaccatgatttatagtcctttgggtatatacccagtaatgggatggctgggtcaaatggtatttccagttctagatccctgaggaattgcaacactgacttccacaatggttgaactagtttacagtcccaccaacaatgtaaaagtgttcctatttctccacatcctctccagcacctgttgtttcctgactttttaatgattgctattctaactgatgtgagatggtatctcactgtggttttgatttgcattctctgatggccagtgatgatgagcatttttttgtgtgtcttttggctgcataaatgtcttcttttgagaagtgtctgttcatatccttcacccactttttgatggggttgtttgtatttttcttgtaaatttgtttaagttctttgtagattctggatattagccctttgtcagatgagtagattgcaaaaattttcttccattctgtaggttgcctgttcactctgatggtagtttcttttgctgtgcagaagctctttagtttaatgagatcccatttgtcaattttggcttttgttgccattgctattggtgttttagacataaagttcttgcccatgcctatgtcctgaatggtattgcctaggttttcttctagggtttttatggttttaggtctaacatgtaagtctttaatccatcgtgaattaatttttgtataaggtgtaaggaaggggtgcttggagatctttttaatagtgaatcttgggaactttaaggagaattacttgttagattagaagtagatagcctgtgattccaggaaatgtaaaattgctcttcctgataattattttgactgattgtaaaaccctttccatcactcagctacagatctattaatatgttctgactaaatattgtttagtttgttttattttgcttggggcaagggaggaatttagaactgtaagctcacctgttagggattatgtgtaactttttttttttaattagaaaatgaagcctagttgctgtcctaattctagtctctattcacagtctcttacttgaagctttagggacatgtgtgatcgtgggtcccagggaaaacatacagtcctggcttatgtaaaactgatagctgagatagcctttaccttcactttgtggtggttgctctgcctcacttgcactgcttcattttagattttgttacagttactccaaaattatttctatgatttgttgattcctatggtttgcctgttgtagttaaggtctttacattttgccttgagcatatagttctctgctgcaaacctcatgaacattatttagccttttacctttttactttgtctttcttcatgggtccttttaatttcatcagaaaacttagttcctcaaattctgatttataatattcatagatgcagagtgatacttaactttctttggcaataccaattacttttcttccttaactgattcttggatatttctggctatttcaggttttaatatcatacaatcttagtgccatagagttcatatacttttttattttaaaataaaaccaggctgggcacagtggctcacacctgtaatcccagcactttgggaggcccaggtgggaggatcgcttgaggccaggagctccagtttacgttgaactatgatcacaccactgtactccagcctaggtgacagtaagatcctgtctctaaaacaaacaaaaattgggcattattttgctgtctgtttacttagttgatttaatttttttaacctcctaattcaagacacactttttagttaaatattttctcaaaatatgccacacatgccagtggtggggcacaagagagttttaggtggtacaccaacaggcactaagtaccattgaatagcgtcatgagaaagcaataaggtttctgttaatttttctcaatttaatatgattatttttttctgtccaattcttgtaaatctccctttatgctaaagaaagcagaccttaagctcaaagctcttgggcaagcagagtatttgaccattgtttaattttcattgaattagtatttttttccccactcaaattacttttactgtgaaactggtgttgcatttatagtaaaatataacgtgacttatttacaaatattaattttgattaaaaagggagggccagggtggtggcgcatgctgtaatcccagcactttgggaggctgaggtgggaggattgcttgaggccagaagcgcttgaaaccagcctcagcaatatagcaagaccctgtctctacaaaattttttttaaaaaattagctaggcatggtggtgcaaacctgtagtactactcccttaggagactgaggccagaggatcacttgagtcctggaattcaaggctgcagtgagctatgatcaagccattgcattccagcttgggtgacatagtgagaccctgtctcttaaaaatataatgacaataatataaataaataaataaataaataagggaggttatctatgttcatacatacttaaatatttctgtaataaaaatttaatttgtgagttagtacaaaatatattaactaaatagtagtgtagattaaagaagatagggcaaatattgtgatgattgtatgagaattactgaatttggaaggatggtaaactaaatcataatctttcctaaatctttcctaaatctgataatatcatctatttgataaatgttctttggtcaaggaaaactaattttcttaaggttttctgatgcagtgattcactctttaaagactttttaaaactttttgtgttttgttttcatttctatttttaaagtccataagtcaacattaacatagtgcttgattacttgctgatttttttgtttctggtttttgaaagtttgggacagagcactgaatatcgtcacatttggtcccttgaaatctccaataagcccaatgtatctgagcctgaagaaccaaagattcgttttgttgctggtatccatggaaatgcgccagttggaactgaactgcttttggctctggcagaatttctctgcctgaactacaaaaagaacccagctgttacccaagtaagagaatagccgaggttgacatgctttaaaaggaaaaagctcaacattaatatcagggcaccatttttaaaatttttaatttcttgctagattttacagagtcacttgtagtacattatgaactttactctttaaaaatgaaccatctttgtagtatataccctttgttaatagtgtctttctattatatttccttgtatgtcttaagaggcatgcaggaaagaatactaaaaatttacattcaatttcctactccgtcatttaatagccacactacccttccagtctttattcatagttctttactttttttttttttttttgagacagagtcctgctctatcacccaggcttgagtgcaatggcatgatctcggctcactgcaacctccacctcctggattcaagcaattatcccgcctcagcttcctgagtagctgggactacagatgcccaccaccatgcccggctaatttttttatatttttggtagagacggggttttgccatgttggccacgctggtctcgaactcctgacctcaggtaatccacctcctttggcctcccaaaaatgctgtgattacaggcgtgagccatggcgcctggccagttttttacattctgacttgagggacttccattctgaattacttataactaggacactatattgaaaaatctagtgaaagcctagtttttcagtatagttttctttttcatgtaatacataaaaaattattggacatcttggctgctaagagattttagaaaaagcaatatggtgttatctactttagcaatctgtgactacagaaaagaactttgactggggtgtgatggctcatgcctgtaatcacaacacttcagggggctgaagagagaggaccacttgaggccaggcgtttgagaccagccagagcagcagagtgataccttgtctctacaaaaatttaaaaaattagctgggccttgtggtgcacacctgtaatcctagctacttgggacgctaaagtgggaggatcacttgagcctagtaggtcaagactgcagtgagctgtgattgcaccactgcattccagcctgggtaacaggctggaatctcaaaaacaaacaaaacaaaacaaaactttgacccagaggcttgggcacgtatgattaagcatcctagttgtacgttgcctcagagaagggaaggaaagagtgaaacactcactaattggcactgtccatagtggacttaggaaagggaaaaagaactgatatttattgaatacatattttgtgctgggtaatataccaggtattttatatacgtcattatatcctcaaccctgtgataatgattatctccattttataaatgtagaaactgaggcagtcccacagctagaaactggtaaaactagaatttaaacccacgtatgtctactttgaagcccagtgcagttctgcctccccaaaacaaattgggaaagaattgatgtcatgattaggatcagaagggacctgtgtaattaggtgacatgaacttaaatcagactgaccaaaaattatgttatcttcctttgtgggacaggtgctctgtgttgcgaacttactcaactctgccattagagcacaaaacagtcatatgtaaatgaatagtcatgcttatgtgtcagtaaaactttatatacaatagcaggcaccaactggatttggcctgctgttagtggtttctcacccctgttctaagtcactggaaggtctctgggaacattagctgtacagtagttttttgcttatttttaatatatttgaagcaaaaggaaatttaattttttattttttcattcatcttagttctgtcttttaaattaactatgtgtagaataaacagactttctgtttgaggcatgagagggtacccattgattctacatgcagctagtaactcgttaatttctgtttgtgcttcagttggttgacaggactaggattgtgattgtcccttctctaaatccagatgggcgagagagagctcaagagaaagactgtacttcaaaaataggacaaacaaatgctcgtggcaaagatttggatacagacttcacaagtaagactaatttttaggctactaaagtacttaggagataattttctttctgctagaagattgattgatcctattttgtcagtgaataatggagtactttcttgtctgggttatgaatgtgaggtataaatgaattcagacatctggaaaagtttttgaatttttctccattattatttgcaaaaataatttaagtttttcatagaaattcaatccattatattgggatgtttgtttcttcactagttgtgtagagatgtgtattctctctcccctcctatgtatgtgtgtatgtgtatacacgcacaacacacacgtatgtatattgatttggagagccctatttcttatttacttaaatgggacctttttcattgaatatgtatcattgacatggttcaatttcagtacttatagatctctaacattctttttcttttttttttttttgagacagagtctcactctgttgcccaggctggagtgcaatggtacaatcttggctcgcctccgcctcttgggttaagcaattatcctgcctcagcctcctgaatagctgggattacagggacccgccaccatgcctggccaatttttgtatttttagtagagatggggttttatcatgttgaccaggctggtcttgaactcccgacctcgggtgatccgcctgcccagcctcccaaagtgctgggattataggcattagccactgtgccaggcccaacattattttctaatggcatctagtatgccatgaatctatgacagtactcttaatttattcaaccattttctactgatagatatttactttatttctgattttttgcttttgtaaacagtgctgcagagaacacccggctttctgaaactctaattttcttccaaagataatgtatttgtccattttcacactgctgataaaggcatacccaagactggaaagaaaaggagttttaatttgacttacagctctacatggctggggaggtttcacaatcatgctgcaggatgaaagccacttcttacatggtggcagcaagagagtgtgagaaggaagcaaaagcagatctgataaacccatcagatctcataagacttattcactatcacaagaataatacgggaaagacccgcccccatgattcagttacctcccaccggctccctcccacaacaagtgggaattctgggagataaaattcgagttgagatttgagtggggacacagccaaaccatatcattctgccactggcccctcccaaatctcatgtcctcacatttcaaaaccaatcatgccttcccaacagtcccccaaagtcttatttcagcattaactcaaaagtccacagtccaacatctcatctaagacaggtcccttctgcctctgaggctgtaaaatcaaaagcaagttagttacttcctagataaaataggggtacaggcattgagtaaatacagccattccaaatgggagaaattggccaaaatggaggggctacaggccccatgcaagttcagaatccagcagggcagtcaaatcttaaaagttcaaaaattttctcctttgactccatgtcttgcatctaggtcatgctgatgcaagaagtgggttcccatggtcttgggcagctccacccctgtggctttacagggtacaggctgtctcccagctgctttcaccagctggcattgagtgtctgtggcttttccaggggcatggtgcaagctgtcgtggatctaccattctggagtctggaggatggtggccctcttctcacagctccactaggcagtacctcagtagggactctgtgtgggggctctgatcccacatttcccttctgcactgccctagcagaggttctccatgaggggcctgcccctgcagcaaacttttgcctggacatccaagcttttccatacatcttctgaaatctaggtggaggttcccaaacatcaattcttgacttttttgcacccgcgggctcaatgccacatggaagctgccaggtctcggggcttccacccattgaagcaacagcccgagctgtaccttggccccttttagtcacagccggcacagctgggacacagggcaccaagtccctagattgcccccagcacggggaccctgggcccagcccacaaaaccagtttttcctcctgggcctccaggcctttgatgggaggggctgccgagaaggtctctgacatggcctggagacattttccccatggtcttggggattaacattaggctcctggctacttatgcaaatttctgcagctgggttgaatttctccccagaaaatgggtttttcttttctattgcatagtcaggctgcaaattttccaaacttttatgctttgcttcccttataaaactgaatgcctttaacagcacccatgtcacctcttgaatgctttgctgcttagaaatttcttccgccagataccctaaatcatctctctcagattcaaagttccaaaaatctctagggcaggggcaaaatgctgccagtctctttgctaaaacataacaagaatcatctttgctccagttcccaacaagttcattatctccgtctgagaccacctcagcctggaccttattggtcatatcactatcagcatttttgtcaaagccattcaacaagtctctaggaagttctatgctttcccacattttcccatcttcttctgagccctacaaactattccaacctctgcctgttacccagctccaaagctgcttccacatttttgggtatcttttcagcaacacctggctctattggtaccaatttactgtattagtctgttttcaaactgctaataaagacatactcgagactgggaagaaaaggagatttaattggacttacagtcccacatggctggggaggtttcacaatcatagcggaggatgaaaggcacttcttacatggcagtggcaagagagaatgagaaggaagtgaaagtggaatcccctggtaaacccatcagatcttgtgagacttattcactatcacaagaatagcatggcaaagacccgcccccatgattcagtcacctcccactgggtacctcccacaacacgtgggaattctgggagatacaattcaagttgagatttgggtgggggtacagccaaaccatatcagataggttatttatatattccctaaattattttgtaaagctggatatgcttattctttttgtttttttaataagatttttctttaacttgcttagagtcattagtatatacacatcctgaagtacataataaaactcagactaacctaccttctgtaatgtatctttcttgcttgagatagtggcttatggagaaataaaatatttatctacaaatttttaagttagcattttgattgtattcaagtagagaatattttcttagatactcatactaagatttaaaatttgatattttatatttgacttttctcttttttagataatgcctcccaacctgagaccaaagccatcattgaaaatttgattcaaaaacaggactttagtctttctgttgccttagatggtggttccatgctggtcacatatccttatgacaagccagtacagacaggtatgtagaatgtcattttatatatatactgtttaagcttaggtagcaaatcccaattaagtaatgtcccttccacatttttataaatagtgagcatttgagcacactctatgagcaaattaccaaccaaagaagattgtacatacatcagcagttcagttacttggagagctcagatctaatggtagcccagctttattgagtctagctatcttgttccatctgttccatttagtccacaagcatttactgagcaattattatgtctgtaaatattgagaatataaaagtgagtatgacacggtttctgcctcatgaaactcctatgtaaccaaatactaacagtacagatttgtccttccctgttttaaactttgactaagtggttgcaccttatggtgagttaaatagttggttgtttaatctctgtggggtcgcagtatatggagatagtttgggtggttttcagtgcatcttacaaagaatattgttattaggctacagttgtcccaaaatgcagtaagacataccaaaacaagtttgtattttagtgtgatagtctgttgtgaaaactcaccattagaaccttttcatgtaaagaggatgtttgtcttctattatcttgggctaaataaaaccttttagggttaattatagtaacagtatacttaagtggagtgcaaaatttattaggagaaaaagatgacttgtatccatgaaggttaacttgggggaaaaaaatcatttggatttctccactgacttctaaatttttctttctatagtggaaaataaagagactctgaagcatttggcatctctttatgcaaataatcatccatccatgcacatgggtcagcccagttgcccaaataaatcaggtagatgttttccataccttttgttattgctgttgttgttgttgcttttgtggggaaaggagtttcaccttaaggtcttcctgattccacatctcttaatgcttttatagatgagaatattccaggaggagtaatgcgtggagcagaatggcatagtcacctgggcagcatgaaggtatgctttctagaacatggttagaatggagttatggccaggcacaatgccgtatgtgtaaacccagtgctttgggaggccaaggcaggtggattttctgagtttgggagttcaagaccagcctggccaacatggtgaaaccccatttctactaaaaatataaaaattagctgggtgtggtggcagacgcccgtaatcccagctacttgggaggctgagtcaggagaatcgcttgaacctgggaggcggaggttgcagtgagtcgagccgagatcgcactactgcactccagcctgggcaacagagcaagattccatctcaaaaaaaaaaaaaaaaaaaaaaagaatggagtttatgaatatcagccattgagtacaagaataggtgacttttctggtattgtaaagtgaatggcatctgcctcatggctttcttgacatgtttagcccttacattaacccgacagtacttttttggccattttaaccatttttaattgtacagtttagtgacattaattaaatgttgtgccccaaaaaccatatctatttccaaaacttcatttgccccagacagaaactctgtacccactaagcaataactccctattcccctctcccacggctcctggaacccctgtctactttctgcctctatgaatttgcctattctaggtatttcatgtaagtagaatcatacaatatttaccctttcacttagcaaaatgtttttaggattcatccattttagagcatgtatcattacttcattcatttttatggctgaataatattctatttatgtttataccacattttatttgttaattcatgtgtcaatgggcacttggatttctactttttggctgttgcaaatgatgttgccatgaagattggtattgcaggtatctgtttgaaccctgtgctgccatgaacattggtattacaagtatctgtcacttctttggggtagatacctaggagtggaattgcctggttatattgtaagtctatgtttcaccttttgaggaaccaccaaactgttttccacagcagctgcaccattttacattccttaccagcaatgtttgaggtttccaattttcccatatcctctcctcaccaacacttatttgctggtttttttttttttaaacagagtctcactttgttgctcaggctggagtgcagtggctatggctccttcgcagcttattgcagcctgaacctcccaggcccaagcaatccccccacctcagcctcctgagtagccaagaccacccgcatgcaccaccatgctgaaccaattatttttaattctttgtagagacagggtctccctttgttgcctaggctggagttctttatatattaatataaaaggctgagcgtggtggtggctcatgcctataatcccagcactttgggaggccgaggcgggaggatcacctgaggtcaggagtttgagaccagcctggccaacatggtgaaacccatctctactaaaaatacaaaaaaattagctgggcgtggtggcaggtgcctgtaatcccagctacttgggaggctgaggcaggagaatcgcttgaacttgggaagcagaggtttcagtgagccgagattacaccattgcactccagcctgggcaacaaacacgaaactctgtctcaaaaaaacgaataaacaaacaaaacccattctggatgctgtgtattctagataggaaattcttatcagatacatgatttgcaagtattttctcctattctttaggttaccttttaaatttcttgattatgtcctttgatacatgagtttttaattgtaacgaaatccagtgtacctgtttttgttgttgttgcttttgcagttgttatcctatctaaggatctgttgctaaatccaaggtcatgaagatgccccgccccaccccatgttttcttttcttttttttggagggcaaatgtgggatgagtgggaggggcggggtacatggcccccctgcccacctccctgctccctgccgcctatccttgtgttttctttgaagagttttatgggcttggcacggtggctcaggcctgtaatctgagcactttgggaggccaaggtgggtggatcatttgatgtcaggagttcaagaccagcctggccaacatgttgaaaccccatatactaaaaatacaaacattagccaggctgtagtgctgcgcacctgtaatcccagctacccgggaggctgtggcaggagaattgcttgagcctgggatgggaagattgcgaagagccgagatcttgccacttcacttgagtctgggcaacagagtgagaccctgtctcaaaaaaaaaaaaaagaaaaaaaagagttttatggatcaagctgccatatttcagtcattgatgcagtttattttttatggtatgaagtaggagttcaacttcgtttgtttgtatgtagaaattcagttgtgtcagcactatttgttgaaagactattctttccccactgaatggttttggtatccttcccaaaaatgagtttaccatagatgtgtggatttatttctggactctcaattctattccattggtctatatgtttgcctttatgccagtatcacttttttttttttttttttggttgttgttttccttttttttaatttattttttatttatttttatttattatttattatttattatttatttttttattatactttaagttttagggtacatgtgcacaacgtgcaggttagttacatatgtatacatgtgccatgttggtgtgctgcactcatcaactcatcatttaacattaggtatatctcctaatgctatccctcccccgaccccacaacaggccctggtgtgtgatgttccccttcctgtgtccatgtgttctcattgttcagtccccacctatgagtgagaacatgcggtgtttggttttttgtccttgcgatagtttgctgagaatgatggtttccagcttcatcagtatcactgttttgattaatgtaggtttgttgtagtaagttgtaaaattggaacgtgtgagtctttcagctttattgttcttaaagattgttttggctattcagggccccttgtcattccatttgaatttgagcattggcttttctttttctgagaaaaggggtgttggaattttgttagatgttgtgttaaaaccgtatatcactttgtgtagtattgacatctctacaatattgtcctcctatccattatttaggtcttctttaatttctgacagcattttaattcattgtccatccacttcaaattaggcaggagttgttagcagatgggtggttggctgatcattttattcacatgtgcaaccagaaaattgactttattcccatttctgcctgtcttccctcctttatttactaagaacttactactgggaggcattttgctatattagtgataaataaaatatactgcctggcctattgtacgaattaactgtgttacataattaattgatttgatctggaagagagcaactctcagcaggccgtgagaaattaaagacacaaaaaattatatctagtcagagatacagccttttctctttagaggagatggcatttgggctgcagagatagtgaagcagaacattccagaaagaggaagcagtacatagcagaagtctaatttagttagaatatggggtgtaatgcagagccacagaagtttaagaatggaaagagtgcttgttgctttgaatgctttgttttaataagaatgggaaactgaggttttgagcaggggtaacaatattgacatgatctgagctatgctatgggaaaactaatctctaaataatcagttaagatagtttggaggaaggagagactggtacagggagaccggtttggaattatctagacaaaaagtaatgagggcctaggttatgctagtggcaacgagagtagagtcaaaggatgacattttagatattctatagaggtagaattgacaagattcagcaaattatggatgatagtgagatagagaagtcaaagacaagaggtttcattgctatgtaagaaaatgagttaataccattaactgagttaggaaaaagaagagattttgggaaaaggtggtaagttgggtttttgaacctgtctgcacaggcagttcctgtaccttgataatatcaatgccgtattgcagggagtggatattgtcaccagcaggggtccaggttgagggtatgagagagctgatgatcattatctccatagcttcaagtacaactgtgacatttctgggttttgagggaagctgaccctcttctgcatgtactcattcattcatttcttcagcaaacccgaataaaccccatctacctggcactaccaggcactgtgggaagcactgaagataggaaaatgaattcgacatagcccctgtcctcaagggctctcatagagtttgtgattgattataatacagagaggtttatttatatttgtcataaaatgctttacagcttctttgtttacgtcagctacgttttcttttcatttactccatttgttgtattacaaagccttattctttcttttacttattaattttcccacatttgattttgaactttatattctaggattatagtgtcacctatggccattgtccggaaatcacagtatacacaagctgctgttactttcctagtgctgcacgactcccttccttgtgggcagacaataagagatctcttcttagtatgttagtggaggtgagtcttttccttttaactagaggcaaactcccaggaatatgttcagtgaaaacctttatcaaaacattgtcttttaccaaaaatgtatattatttattttaaatttatatagaaagaagagttttggtcattttatgtttcctaaatagatgccatttattcacatctctggaatctgctataatttaggtaatttgaccttgcaagatgctgcaagttctttaatttgaatatcacagagttactggagtcagtataccatggtgggaaggaaatcactcaaggcattggaagattgggttctaatgcttcaggctatgacaatatcagagttctcttttatttccagctctgtgagcctgaatattgaatgaatagcaaacaaggtcagagtcagtggggagggaagagaagaagcaggccatacagagtttgatacttgtttgtgtgtggtttttgttttgtttgtttgtttggttggttttggtcatgcctcaagctagtgcctctaccatgtctggcattatgacaacataaatttatattttaaacattttttcaggttcacaagggagttcatggatttgttaaagataagactggaaagccaatctctaaagcagtcattgtacttaatgaaggaataaaggtacaaacaaaagagggaggttatttccatgtactcttagcgccaggtgtccataacattattgccatcgctgatgggtaccagcaacaacattcacaggtaagaaactcaaattgagtagcatcatgtaaatttttattcttaataatacttctgttttattttgaaactcttgttagaaatcttgaagggaataaagaaattaaaagtgtgactgcctcttgattatgatatcttgttatccttgtaccccttgctaacaaaagggaaaattttctagcattttgtatactttagatggcaatgcatcatctccttagtttgctatatggggcctaataatatagcagggatacagtacaccttaagcagaatttgtcatgattcttacactttctccttctaggtctttgtgcatcatgatgcagctagttctgtggtgatagtctttgacacagataaccggatatttggtttgccaagggagcttgtggtaactgtatcaggtaaagacattttgatttttagtagtaaaagttaaaaacaatcttgacatttcaatatgagagtgggtcacctctctcatattgatcctgaaactaatcacttgtcttctaatgtctccttatctaaatgtgattttcctggacctctgttctcgcatatgttctcctggcttgcctttctctgccgagaccagctccatcaaggagaccctaacccagcggtgctagagaaattaaagacacacacagaaatatagaggtgtcaagtgggaaatcaggggtctcatagccttcagcgctgagaacctccaacagagatttacccaggtgtttattaacagcaagccagtcattagcattgtttctatagatattatattagctgaaagtatcctttatgggaaacgaagggatgggccaaaataaagggatgggttgggctagttatctgcagcaggagcatgtccttaaggcacagatcactcatgctattgtttgtggtttaagaacgcctttaagcagttttccgccctgggcgggccaggtgttccttgccttcattccggtaaacccacaaccttctagtgtggatgtcatggccatcatgaacatgtcacagtgctgcagagattttgtttatggccagttttggggccagtttatggccatattttggggggcctgttcccaacacttctctttcttcaggtctatactcaaacgtcacctccacggagaggctttccctgatcaccctagctacccctgtcactatctctatcctgctttttttcattatagcactttcataacattatatatttgttcatgtatttgtctatattcaatctctcccactaaaacataagttctgagagagggaggaatctacctgtatcctccaagcctagaacgatggttagcacgcagtgggtcttaatgaagagttgttgaatgaatgaatgatttgctttatattaaagtcataagttcctaggactttgacttatattagttccgctttttcaagatccaggaaagaggaaatgtttgtttacgctggaactaattcatgtcattgcttggattactgaaaggttaggaaggaaaaaaatgtggtaaaatgaatactctgctatactttatctatttgatacaaacagccttagtttatttctaagtgcagcttggatgaggcagaataaccaagttttatcacagggttcctgtgggagagacccttagttgagagaaagtagtatattggaaacatggcccaatcatagatcctgtgtggtgtgtttaaagggttcttagcttgtctcagataaagtgtaaataacttagtggttaaaaacacaggaggtagaattcagccatggtttaaatctggctctgtcacccattagctattgtgaacttagtttttattacttttagtttctaacacttttattttgataaccttgtacaaatttaaaataaacaaggagatttggatgaaatgaaagtttactggaaaggaaaagtataatagaagtcataaaaagcaggttgcagaacagtagacacagtataatttcattatggtaaaagaaaaaaaatacatgtacgtgcatatgcataaagaaagatctggagccaggcatggtggctcacgcctgtaataccagcactttgggaggccgaggcaggtggatcacttgaagtcaggagttctagactagcctgggcaacatggcaaaaccctatctctagcaaaaataaaaaaaaattagccaggtgtggtggcatgcacctgtggtactacttgggaggctgaggtgggaggattacacacacacacaaaagatcttataactaaaaatgatctctgggtaatggaaatgtaaatataggaggttttttggttttggcttttgttagtttgcttatctgtatttttaaactttgtatattgtacatatactgcttctataataataaaggttgttcttaagtgcatgaaatagaaataaaataaatgaggggtatattattaaaagttccattgtaagcggctgcttattaatatccttaaagtataatatcacccacatgatggtttttgtttgtcaggtgctactatgtcggcattgatcctaacagcttgcattatttggtgcatctgctcaatcaagtctaatagacacaaggatggctttcatcggctcaggcagcatcatgatgagtatgaagatgaaattcgcatgatgtctaccggctccaagaagtccctcctaagccatgagttccaggatgaaacagacactgaagaggaaacattatattctagcaaacattgaaaaacacattttgcatatctcccagcataagtaccaagcaaaattacagttcctcttgggagaacactgcattaagaagagagactctcttgcttcttcaaagagctttgggaaattaaattgctaaatttgtattctctgtgaatttcactggcagttttgaacttcccttccttaaagtactctaaacctttaaaaaaaaatctgatttatgcagcagagatgggacagccactttttctttttaatttaagatgagctatttggagcttatgtaataatggcataaagccaactagaggatgttgtattttgcacatcagatgtttactagtggctttagtatttttctttgttttaaatggccaaaagaatccagaaacattaaggcagggacagcagtcagaatcgacataaagctttaaaaactcaaggttttttcaacctactgaggagtacttttctctagttgttaaatagctggagtttttcttattcaggtttaatggaggttgaattgatttttaaacacatataacagtaggaaatgaataaatgggcttctgcatttggctttctacctgttccaaggctagatcggaactggtagactacgctgtaagcaggatttcactacctctcttaaggtttagcaaacttctaaatagcccattttaagggagaacttactaactttattgtgaaaggtctaaatgcccacttgaatgaagctgagagagagatctagcaaaagctaaaactcatgttgtctatctttgaacttggtaaaaacccacaggtgctgctgcttatatctgtgaagcactagcttattctaggaatgcctgattctttaatattgcctaaatcggaacctttttctatgttgcacacatggttttcagatgacccagccatctacaagatctgaattctactgaaaatatctagaaatgtggaagagacctacttgcacattcttaacctgtatttgaacacaaaatatctatacttcatgctccagcccaagcctataccctgtaatagcatactattattgaaatcgcttgaccggtcttgttcacataggcctctgggagtgatttggttctttgccctaatgtttcatttgacggtctctttttgatcaaccaatttttctaaaagttcagtcgaaagcttttaagtatagcttcctcccttgaaaaaaaatgtaaactatgactgctgagtgataaaacactgtggtgtgaaagtgtcatcttcactgccaatcaggcaaagaccggaaagatttgcattttattatgtctgtcttatcatgcaatggaaatgatgctttttgtaagtatgcatcttaccaatgatgtaacggtttaatacctttgaatgttttaataaccaagttgctgctgaacttatactaaatcaggggaccaaaaaacttgctcttatcttctcaaattgtattctatatccattaatgtatcagttatcccaaagccttcaggtggaggggtttaccaccttcctaggtcgttcaaccaggttttgtgaggaatgcattcaaagtggctttataaaagaagattttctttagcaagaataatgaggtcatgtcatttgttaataagtatctgtgataaatccgtggttcaaggttaagccattctggtattctggtattagcaactgtaaattctgccacctcatacatggaacagagcttgtgggatgctaatagttagtgaagtatacatgatttaatttctaataatctttatgttttctttaaggatggtggtgtattgctctttttcagctttatttttaagagtacagtcaggaaaccaacaaggggcctaagagtggctgcccctgcttgggacattacagcaagtgaaacaaagttaatgtgacaagctttgctttgttatcattggtcttcactagaggataccttttacatgtacttctctcttggatcaaatatgtctttaactgtacatctcagtggctggaggccatgccttttaagcatgtgtaaaatttttaaagaaatgaacatacacatagttattttagtaatatttcctgaaagaaaaaccaaattctgctataagtcttgatcttcaatgaacttttaaataatgcatttagctggaaaacaagactttcccagcttgtattacctagaagcgtgaatgtataggatacctgactactaagactatattctcagccctgccctgtcttttatttgcgggtctaatctaatattagaatatattaaccgcttaaggcattgaagccatatgggatggggaatgcatttcttcagtgtttctccgagagactttccatttccttggagttatggcggcaagtaagtatcatagtattaagaaatttgcctaaatctgagttgtgcctttctttactcacaaggcatgggctttgtcctggtgatcagtttgtaagccttcttccttcccagctccttaataaaagcaaagtgattgagtaggtaatgttcaaagtgtctgcctgtgtacatgtacttgtattgattatgtagttcagtaagatgtgcccaagtcatttcagaaagaaagacccttcagttttgatgcattttgctgaacacttgggtagtgagtgggatcctatccagttgaggaatgcttgcaatgctcattgaagggatttgctttgggactttgtcatcttccagaaaggaaacatattgtatatttggcccagtgtgattgattgctttatctttggtaacttttacttgaatgggatttgctgaattaatgactattgaatttaaaactaattatgagttgacaaataaataaaaggtagtgtttatgtctgagcttattgtgtttgagctaacaccaggttactcagtaaccatgacctgctcctccatttccatttattctcaacattaaatagttttatcttgttgttgccagaaatgcacttgtgccaggtattgtccctgctgtatgaaaagcttcttggcaatgaattctgtaatagtgccctacattatggttttctggtggaattgttttaacagtgacaacccaggatttccaatatatttttgttttattgttattaccaaaaattccactatgattgatgttcagtgattttctatagcaacttttttggtaactctttgggtttctgatttgttttagctaaaattttggggatatgatttgggtctttgattaatgtcagctgaacttggatttctagttcatgaagaaatctctcccaatacccatttatcctatttttagcaataattcgttaatgattccacttgattttcagaatattgtcctggttgattttgatttgacagcatacattatgaaatttgaaagtaggttaccattttgaggcagttggatataaattatgtaaatatgtatgattatgatttttataaatggcataacatgagtgtactaactaccttctatgctggccatgctacagattttctggaggtatgacaatagtatttttttatgctcagattaaaaatcagcttttcacctctccagtttttccaagtgatactcccagttctagagcaatctacagctgtttatgtgaggtgcccaacacccattcatctcaagtgcttcagtctttggtttatttcatgcactgtgccttcaaaatgaaatttttaaaagggactttaaatgaagttgaatagtagtttttaaaagtcaatttgtaatttatgtgaaatctaactgtaatgaggtcctttctgttttttatatgtaaacagatctactaatcctgtataaaagttattttacgatgtttgtctttctttgtgttttgtctcataatcttttttcagatgcaatatgccggaaaaagttataggtccagtttgaaaattatttagtttttctgcctatgctagtggaaaaatagtaccaggatcagaatacagggtatcacctatggaatgtttctgtatttatgaattgactcaaaagaaagctttgtttctgaaatcgcattatgtagtagccacagttttctgtttgtagctcagctagattgttatatatgttcaatcatttcacaataacaacacaaaactggtcattgaaaggtttttatgtacgcattttaaacttgttcgttaaaaatttggtcctttttccaggtgaggcccagttagaataatgtgtcccggcacttttaggcacagcaaggatgaattcaatatccccttttcacttagcaacaatgtgttacttctaccctaataggaattgggaaagcaaagttgtatgagaaacagactctgctgataaagtactcatagtccagaccagagaaatataaatggaaataggttatatttcaatagtgattggttcatctaaaagtctctgctgtaaaggaaataaagcatagaggtttgagcatggactttggagttggaccaatctgtgactgattcttcgttctgctacttgcttccaatgtgaccttgtacaagtttcttgacattctctgagcctcagtttctctactggttgaataatccttgataggattgcagtggaaaattaaatgaaataatgttagcaaaggtcccaacataatatttgacttggaattgaatgcccatggtaaccagcatcattttccttcatgtgatgtcttcttatgcctttgaaagaaagttactttatcaaatgtataaataaagatctgtttataggtgatctttttaatttagaagaaattctgagacacaaataaaaaaagaaattttttattatgtggttcaatagattgtctaaagcatggcagtaaagttttaattatgccaagatgcttcatatttgtttttaaatgaaattaagttgtatttatgcttctttagtgaaaacaacgttacttaactgctacaggaagtgtgaatagtgataacagttctttttctctcagtgtttgaaatattttcctgaattttcttagttttctcatacctgaatcaagaacccttttggtttgtttcataaacagtaatctagttattatgttcagcttttcagatttataatagctgattgttctcagcaaattaaacatgatggtcaacgctaatactactcaattatgaataagtgccattgtgtgggtcttcatgtcttagactcacttatagttagaataccaactggttctatgctatttattgcaaacctcagataaatacaccattaattattacacacaactttaaagcaataaaatcagtagataaagcccaattttacctttctctctctctatatatatatatgtatgtatatgtacatacatacacacgtgtatatgtatgtacatatacacgtgtatgtatgtacatacgtgtgtgtatgtatatgtatatacatacatacgtgtgtatgtatatgtatacacatacatatgtatgcatgtatatacatatacatacatatatatgtatatatatatatatatattttttttttttttttttttttgagacagagtctcactctgtctcccaggctggagtgcagtggcacgatctcggctcactgcaacctctggctcccgggttcacgcaattctcctgcctcagcctcccaagtagctggaattacaggcatgcgccatcacgcccagctaatttttgtgtttttagtagagacagggtttcgccatgttggccaggctggtctggaacttctgacctcaagtgatcctcccaccttggcctcccaaagtgctgggattacaggcgtgagccactgcgcccggcccaattttaactttaatatcacaattttcacctacattagtagaatattaaaagtaaacatgctatttctttggcattttagttgaggtcaaataatcctcttccctaattactgtgtaaacaaatgtagacaaggtaagcacgaatgagacaggatggcctatatggagtagtaaggtgttgaagtttagaggccagcctagaagactgaggaaaaaagggtgagaattacttgataagattgaaggtatggtaattggaagtgggagtatactgagatggatatttcaaattcagcaatatgaagaggcagtgatcaagtcaaaactgtaggtggaaaatcagcaagtggagaaacttaagacggaacacggaggaaatagagtgcagattaaatagaaattgctatgataacatggattatattctgtgattgccattgaggtggagccaaagtgaaggagtaatggagaaagtctagattgctaatttcaaatatttgaggttattccagtatttattattgttatttattatttatttatgtacatatggttcctagcagagtttttcaagactaaacaggcttttgatctacagtcaaaagcattgatgctattgagagggaatggaacagaaagggactgggcaagttacagtaatgactgacaggactgctatatttttaaaagtaataattttagatttatagaaaagttgcagagatcatacagagttgactcctgggttttgatttggaagatgtgagtgttgggaggacaaaagaggaaggattatacacagttttctatttagcagaacgtgaatggaacacattggaaagagggcctgggcataggaaataggatgtctagaatctaggcagccatgcacagtttgggtactccaggtgtcaagccatgtggctctgcttctaggtgaccaagttcaattgaaatctctagtggaaggtgtgtccctcctagagttggagcagacctcacaatttttcacaagtaaaagaagagcagaaaaacttttatacaggtttcagatgtttatattattgaacactgtaaaatataattattgttttcaaatgaataaaagataaacctgagactatcacaaagatctataaaataatagcagaacttctggaaatgaaagtacagaaactaaaatggatagttggagtggcagattgggcacagagaagtaattaactagaagacagatctgtagaaattcttacgtagcatggagacaaaaaggtagaaaatacaaaggagagggttaaaatgtggatttggcatacaactaataccacatgtttgataaccacagttttagaagaaagaaaagaaagtgcataggaaactaagaggcaatgagaattttccccaaattgataaagatagcaacccatagattaaagaaactcaatccaagcaagaaaaagtaacatccacacttagatcagtgaaattgcagatcaacaaagacaaagacaaaagagattagcaattagacactctcaacaatagaagccaaagtacattgaaattatactttaaaaatgctggggaaaacattaaataacttccaacatagaattctgtattgaacatacctttcaagaatgaaagcgaacttcccggtcgctgaaaacattagtggcagcctagctacctgtctcccgatatttcattgcaaaataatgcaagcacacgaaggaaaaagtatacagaaatcacactctcagcataatttgaagtcagagaattttgaaacttcaaactgagtaagatgaggaaaatcagcagatcgcaacatggattctcacaggcccaccccagcagcatcccacaggctctgtggagcgaagccagatggagataaactgcagggaagtcaggagagggacgccagaaaaagaaagtaatgttctaatcttggcctaaaactactgccagaaagactaggtccacctaactctcaatctcaaaaacatgtccaagcagatccgggcagaaaccagaggcaagaggcttcagagtgagcacaatttaaagggggcaggtgtgacttaatgaggcagtctttgaaacacacagcttcaaaagaaaagaaaagaagagcgtctagtgaagggaaaaatgaaaaaaggagaagcacctttgacaattaggtgatgaaaagaagcaaaagaaaattaggtgatgaaaagaagaaaaggaggaaattcgagtcctgctagtcaaatgagaactgcaaaatcagagcacttacaactcctccccgaacatgccaacaaaaatacctactaaagtatttaataccttagctttgctctattatcagaacagatctcagccatgaaacatgaaaatataaatagcatatatgaatgaatattgataagatgaatttgtcattattagatgatatgcttatatatatggaaaatacaaaataatctacagataaattagaaataataaaatttagttccacttccagctgtgagtggattggcttgaaatggaaagacttctcgtcaagagcaattagaaaagctaaattttattttaaaaaaaaactgtttgaaggattggagaactactaatgtaagaaggacttataggatcaagatcccggaacaaaaagagctgagaggtgagcatgatggtaaaactttcacctccaggtatgtttcaattcataggtgacagaagagaggccaggcaagagacagagaactcaaacagaagttttaggcagtatcactgggtggaggaaaatatgaggttagcacctgtcaaggaggtggcactggtaaacagtcttccagttaggaaacctgaatggctagacattagaattaagggttaaccaaaaatagaccaattttaacaaacacagaatccctcttggtattagttccaccccatactggattaagctgatctgcccctacctgaactgcctgcaagaagaggcagtaaattctttctggagaaagacaacatcatctagatcctcaaatgattaatacaaagttgtatctataatatatagcatccaatcaaaagttcttattatcaaaagacaagattaaattgtgaatgatcaagaaaaatagaaacaatcctatgggaagtacagatttctcagttatcagaaatttttaaagaatgatgatgggccgggtgcggtggctcacgcctttgtaatcctagcactttgggaggccgaggtgggcggatcatctgaggttgggagtttgagaccagtctggccaacatggagaaacctcatctctaataaaaatacaaaattagctgggcgtggtggtgcatgcctgtaatcccagctacacgagaggctgaggcaggagaatcacttgaactcaggaggcggaggttgcagtgagctgagatcacgccattgcactccagcctgggtgacaagagcgaaactccgtctcaaaaaaaaaaaaaaaaaaaaaaaaagccgggcgcagtgtctcatacctgtaatcccagcacttttgggaggctgaggtgggaggatcacaaggtcaggagttcgagaccagcccaggtaatatggtgaaagcccatctctactaaaaatacaaaacttagccagtgtggtggcaggcacctgtaatcccagttacttgagaggctgaggcaggagaatccttgaactcaggaggtggaggttgcagtgagccgagatcgtgccactgcactccagcctgggcgacagagcaagactctgtctcaaaaaaaaaaaaaaaaaaaaaagaatgatgatgaatgaattcaagaaagtagaagacaagatgaagaattttagcaggtttttttttttaagacagggtcttactctgtcacccaggctggagtgcagtggtgtggtgatggctcactgcagccttgacctccagggctcaagcaatcctcccacttcagcctcttgagtagcgggactatagggcgcatcaccacgcctggctaatgtttaaattttttgtagagatgaggtcctactatgttgcccaggctggcctcaaactcctggactcaagcaatcctaccacctcagcctcccaaagtgctgggattagaggcatgaaccactacatccagcccgataattaaaacatttaaaaattaaatcaacaatttcacttctggacaaaatggattagctgtatttctttctatttttcccactaagcacagcaaaaaaaaaaaaaatcatatatatatatttttaaaaagactcaaaaaggtggaaagaagaaggcagaccagctaaggacctcagaatgtaaagaacatgaaggtgagttccctgggtttcctttttgtttcctatgtcctatactgggtgctggagaaactggcaacctagaaatgccaaagggtgcagacaagaaaagtccaaaggaaaatggaaagccttctctctccagacaagggatgaggaaacaggtatcctaacaagacagaatacttttggacaataatttcaccactctggacaaatgccacagaaaaaactgaggcccatcttcactccttgccatcaaaggctgagtgaggaggctaggcttccacactcacctggctctaatgaagcactccacccatcccccacttggacttctcgtccattgcacagcagcaatgaggctccctgccatggtggcagtggggaccacatgcggagcagtaacaaggcaccccctccctggggaatcagtgaaggccaagggagagcctgaacttccactgccacctggaagtagcaagcatttccctatgtcccccagcagcatagtgtcagaggaagtctgcttaaacagaagacataaataagatcagaatctcataacaaatacctgaaacatcaggatacaatttataaaaattgtcattccaatagcccagagaacttcgacttgagtgaaaaaaagacaacagaccccaacatcaagatgacacagatgttggaattatctgatgaggactttaaagcagctctaataaaaatactttagtgagcaattacaaacaaacttagaacaaatgataaaacgagtctcagcaaagaaacagaagatataatgaggaactgaacagaagttttagatacgaaaaatgcaataattgacatgaactcaacgaataggctcaacagcagaatggagggaacagaggaaagacatactttctgtcagcaaatctgaagacagaatagtagatagtaccaaatccgaatgatggaaaatagactgaaaaaaaattagcataacttcagagctatgtgggacattaacacaagatctagcattcacgtcatcagactcccagaaaaagaagagaaacagtatgagacagaaaaagtattggaagaaacaatggttgagaatcccccaaatttggcagaagacataaatgtcagaatcaagaagctgaggatatcccaaacaggataaatccaaagaaatctacaccaaggcacatcataacttctgaaaactaaagaacagttcttgaaagcagtgagagagaaaatgtattttagctacagtggaaaaacaattccaattttagtcaatttcttatctgaaactatggaggccagaaggaattggcacatttttcaagtgctgaagaaagaaattgtcaacttcagattgtatatctggcaacaatatccgatcccccaagaatgaagggaaatcaagacattctcagatgaagaaaaactaatagaatttgtcaccagctgatctactctttaaaaaaaaaatggctgagggaaattcttgaaacagaaaggaaacgattagaaaaaggaatcttgggacactaggaacgaagaagagtaaaatatgcataaatcaagtaagctttcctcttctcttgaattctctaacttatgcctgacccttgaagcaaatattgtaacactgatgtggttctcctcaatgaatgcagaggaaatacttaaaaacaactatattataaatgagtgggggaaagaactttacaggaattaaggtttctacacttcactagaattaagtcagcaccggtagactgtgataatttatgtatctataaagtgtgggtttggacagcagattttatcaggttgagggctcaggccgagagcatgtagaagcagttagctcactctttctagatgtggcggctgacaaggacaaagagggctgggactagaactgctgtagacaaggaaagcagccagtggagaagagcgcatacgccaaagaacgtggatgatggagcacaggcggggaggtaggatgaaggaaatggctctgggaagaaagggtctctatgtctgagaaaggaagaaattggctgaagatacaaattagagacaaggtgagggaaattgagggagttgcctgaggatgattctcctcccagtcaagtaggcacctgctgagagaaaggataagccgagatgagggagatgatgatggtttggggcgcagaaagcgggaatgaaagacaggagctaaagccgaagttttttctctctcgctacttaaaagctgtaagataacgaattgatcagcaggtggcagtgtccgcggaggctcgcatcccgtcggccctggctctcaaggcggaaacacgcaccatggtgactttccggcctgcatcgcctctgctcccctatcccggctgacgttggacgacaaagatggcggcagggaccagcagttactgggaaggtgagggcgagaaggcctccgggtgcgtcctacgagggtgagaggggctgagtgaggacagatcttgggagaagcagcacaggaaagaaccagactcccggagcggccgagctgagcagcggggcttgcctaagtgggatccccggggccttggggataccgaacggtctggggtaggggtctggcctggccggggcgtgtgagcgggacgtggggcaggggttgggcagagtggacagagcggggatgtagaggaagagggctctcaatcgcctgggtagaattgtgttgagggagtaatggaactcggacgaaggggcttggggtacgaactctgagaggaaacgaatgttgagggagaagatccagagccccggagactggaggagtcagcgcattggagctgaggtcactattggaaaactgagtgggaaaagagaaggaggaacttgcattccggtccgtcggaggaagtatgaagagaataggagacagaatgtctcttattgggtctccatgacaactacaggttggggacttccaggactgggtgtttgaaggaggagaaaataacttacccttctgctctagagtctagaatcggttttattgaaaaagttgagagaacctgtgtgaattgcagttacatttgctatacttctcccaccaaaaaaaccttcctgtgatttgacaaatgcatttgtttaattcctgaaactatagtcggataaagtgagcttacataaaactcattcgtggattatgatgatcaacaagagcagagaaagctcacctttttctcccaactgtctctttgctttacagccgcatagaaactactttccaaattcctttgacctgtttttattgctatacactgaagcctctagaaaccacagtattgtcactatcagccccttggtctaagaaactcaattctaaatttatccagatttgcctatcatactttcaaaatgcttttacttatgtttcctactagagaagacaattattccaatcacagaaaagcgtgcttatagtttaaaacatgtattacaatgcccatttgaaatgtgtgtaccagctagaaaacttttttttttttttttttggagactcgctatgtcgcccaggctggagtgcggtggcgctatcgatctcggctcactgcagcctccgcctcctgcgttcaagcgattctcctgtctcagcctccttagtagctgggactacagatgcatgccaccacgcctggctaatttttgtatttttagtagagacggggtttcaccatgttggccaggatgttcttgatctcctgacctcgtgatccgcccgcctctgcctcccaaagtgctgggattacaggtgtgacccaccgcgcctggccgctagaaaacattttaaaattatgtagaagaggctactgatatctttattactagtcattagcctgtggttttttgaagcagcatgctataatattacagcggctcattactgacaacctactctgtgccagctgctgtaagcatatgattaccaatacataagcaaaccctgaaggtaggggtttaaaaaacaagaagctgaagttcataggttaagtagattgttgataaatcatagagtcagtaagtggctgtgccgagattcgaactggcatttggtctctgggcaaatatgctccactatgttaactacgctttctatttctggttgaaaagcatattgaaataatgttttgtattctttttgaaagagagattcttataccattacctctggtacttctgcccttttattttaaccttcacttcaccatgaatgagaatactcgtatctgtgtgtgggtgtccagactgtggcttctgtcacgcaacccttagatgccagactgctaaaccaatttctctacttgcctgtttgcttctgctattaaaacttatgtacttatttctatcatactcatattcgaccttgttagtagcacattgtttattgttagttttagccctccaaattactttcagtaagtttttttcttttttttagatggagtctcgcactgtcgcccaggctggagtgcagtggctcaatctccactcactgcaaactctgccttccagtgccttccaggttcacgccattctcctgcctcagcctcctgagtagctgggactacaggcgcccaccaccacgcctggctaattttttgtatttttaatagagacagggtttcaccgtgttagctaggatggtcttgatctcctgacctcatgatccgcctgcctcggcctcccaaagtgctgggattacaggcgtgagccactgcgcctggcctcagtaagttttttaaaggcggtttttggccaggtgcgatgtctcatgcctgtaattctagcacttttggaggcccaggcaggagggtcactggagtttaggagttcgagagcagcctgggcaacattgtgagaaaaaacagaaaagaaaaaaagaaagaaaaaggcaatttttgtggtaactttttttctttatgttcaattgagaagtcattttggtccgggcgtggtggctcacacctgtaatcctagcactttgggaggccaaggtgggtggatcacttgaggtcaggagttaaagaccaccctggccaacatggtgaaaccccgtctttactaaaaatacaaaaattagccaggcatggtggtgtgtgcctgtagtcccagctacttgggaggtagttgaggcatgagagttgcttgaacccaggaggtggagtatgcagtgagccaaggtcatgccactgcactccagcctgggtgacagaacgagactccatctcaaaaaaaaaaagaaaaaaaaaggtaagtcattttgctattatgaaaagaagttcataagcctaataaagctttggaacataaaaagcaaaatccctttcaaaagaataatggcttctttcttataacattaactggtaagttgataatgctggtcataaaccatatttttagttcctttgtgatttgtattatcttcttgtttttctctgaattgcagaattttagttattgctatacaaatagtttcaggaaggatagaacaacatttgttttctagccatctttggagtaaagctgcgaagttgcatctaccattactatttcccttcttgccccctctgaagtttataagtgactaatctgctttgctgggcaagtccttggtttccttcttttaagacttttattttcctttttttgagacatagttttgttcttgttacccaggctggagtacgatggcgcaatcttggctcaccgcaacctctgcctcctgcgttcaagcgattctcctgcctcagccttccgagtagctgggattacaggcgtgcgccaccacacctggctaattttctatttttagtagagatagggtttctccatgttgatcaggctggtctcaaactcccgacctcaggtgatccgcccaccttggcctcccaaagtggtgggattacaggcgtgcaccaccgtgcccagccaacacttttctttatgggggtaacaagatcagtatatgatcattttcatagtttgttttctttagaatggtgctgtgatttttgtgtctactttttatgtctaattatttgttgttataattttgttaaagatctcaggaaacaggctcgacagctggaaaatgaacttgacctgaaactagtttccttcagcaaactatgtacaagttacagtcatagcagtacccgagatggaagacgcgacaggtataggtactaccagattctgtctcctatgccttaactgtgtttttaaagcattaaaaaataaactaaaatatataacttctgtaagttggtctattggtgaatttttggtgttttgttttgccattcattgttttattttttagtgacttattaaaattcttctgaattctcgagactagcatttatttggaatccttaggcaaagattgttacagtgtcagaagaaacctgctagaacttcagaataagtttgtatcaaaaatataagtgtctaattcagccagtgtagggaaaaggtggctgatttgcccgtgtggcatgtatttcttgtgtttttcaattgctaaatggacctgtggatctacccaggtgccaggtatacatactgcttttctggtgtttattgtattagagggtatctaatgcactgtgtatccttgttattaattatcaaagctatctttaattttggtacttttttgggaaactagtgtattaccatattaaatgtatggaaaatacattcttatctttgaagcttatgctctctgtaagtcatccacttgtttcaagaaaatattgggagtagccaggcacagtagatgacgcgtgtaatcccgggactttaggaggttgaggcggatggatcacttgagcccaggagttcaagactagcctgggcaacatggtgaaaccctgtctctaaaaaaaatagaaataaaaaaaaattttttaattaggcaatatttaagacagttacaaagaataatatcatgaacccccatgaccctatctcccatttttaaaaaatgataattactcattccactgaagccccttatggcaccccactttctcccaccccataatccacatatattcttactgcatgtttatattcctgagcaattcatagtattctattatgttatatagtatatatataatatagttattctacaactttttctttaacatttttgagattcagctatggattcatttaactctggtatattcatttgtaattcatatgtagtattttatgactatcacagtttaaccatttgatgatggccattgtttctaatttttgctaattaataataattttgatagctgacataagagtgttcattatatgttaggtaagagctttctataaatgctgctgggaacatttttacgcagaatgtttctatatacctagcggtgaaattgctggtagcagagttgttgttaatccacacttattttacatactttttcaaagattagaagtgagtaggatatttgtcagctaataaaaacaatgaaatctgagcttagatttgaatctagatctatctccagagcccacactctaaaccctactatagtgtatacatttgaacaaaaagctgatttcaacactatagccaaattactatttctttttcataaggactccttggttgtaaaggcagcaaggccaacattgactctaggatctaaaaataaattactaacacatcaaatagattgcattgctttgggcttggctttatttagcaagtaaagagaatgaagaatgttctttctatgcattttctatgttctgtgtgcttcatgaactaatacttttgttattcctctaaaggaaaaactatcttgaaaacatttcccaagaaattctaccacaaactgaaactggctttgtagaattacttcagcctaactccccttctaaataaaaacctaaggccatgaggatcaggatttgatgtctattctaaagtgtcttgtttgatgcccaggttggaagcatgtcactatgagtcaactaagcaataactagaatattatttattccaggcatctttctttctttttttttttttttttaactttctgtattttgagaacttcaaggtctatgaatcattacccacctataagatgaattaaatttaactgaatcccagtattgtgaagaattagtgtttggccatttccctttactcttacactgtcctgatgaatatatgaatacaatgagtatagaataaccagtagtagagattgctctcgtgttcattcatttattcagcagaagtttaatgagcatctactatgtgccaggctgtatactaggtgctaggcatatatctatgaataagacagagcagttttttccttccttcatgaagctttaattctattggcatattgttctttttcatatatctggtagaggaggatttatattagtagtctacagagcatttatttaatacttttcatttgccacacccaggcactgtcacagggtagcacaaagtcttcagtaagattggagactatagtcattgcctgggcatttatctgtgtccagtataactctgatctgtattgagctgctcatcagatgctaatacatacctaacctgatgaaggttagtggtgttttggaaaaggcaaaagaaacactgaggacaggtgggtttagaatttgaatctgtcaaacctaagtttcacttgtaaaaagatagatttttgactattcagatttgaaaaggcaatttaacacaattctacaaaacaaaaggatgattgcatactgtaagtgaaaatggagaagattagtaccaaagcatgcaggacatggctgtatatattggatttaaagccagttcctgagtattcgttagctagttatccaatctgtggatcatttaaacctcaatcttatttcctcttggtaagagtcaaggaaagaagagagaatgtaatgttgaggttgaaggaaccataattcctttggggtaaaaatgtaaaagatcgtttctcacagaccctatataacataatccataattcattttatggctcctattaatcaccttattattttaagtatgttttaaaggactgatttgagtaatggatcctctttaactgaacttctttttagttctgatacaacaccccttttaaatggatcaagccaagacagaatgtttgagacaatggcgattgagattgaacaacttttggcaagggtaagtgctttctgttaaatggctattttgcaaataactgtatacttgttacgtaggatcctggattatattgagacagacatgtttattgaaattatccattccattcaatatgtgtacctccccacaccacttgaattttgatgacagccattctcaggtgatatgatgttattttggtctttatggattatgtgggggaatgctgaattcttacttgctctcttgtttgttttttgttttgttttgttttgttttgttttgctgtcaaccaaaagggcatataggcaaataatttgcttttagctgtttatagtgcttagtaaaatattttgattgttttttttttctttatttctagcttacaggggtaaatgataaaatggcagaatataccaacagtgcaggtgtcccctccttgaatgcagccctgatgcatacattacagcggcatagagacatattgcaggtaatatattgggctcgagatgttttcattatcacaggagtttgggtttttttttttttaatccctgcattggatatgtgcacatatatttaaaaggacaaagagaaaaatctgagaaaataaatgccatgctaaagggacttgttttacttttttttggggtcaccattataaaattctgaaaatatctaatagctcttgctatttcttggcgaagttgagtaatattcatcactgggtacatatacttccactatgggagacctagctagctagctgtaacagtgaaatagccaatggtcatgtatagacaataacgtggtgggtaagcgtgtactttcagctagctttgaagataatatggagggggaattatttactatacttagtatattgtttaagaaaacagtaaatgtgtatgcaccaataaaactaaataaacttttaaagatttaaatggaggatatgttaaaaatatggtagtacaaataggaaggcaattttttttttttttttgagatagggtttctctgtcactcaggctggagtgcagtagtacagtcacagctcactgcagcctcaacctcccaagctcaaacaagcctcctacctcagcgtcctgagcatctgggaccacaagcacatgccaccacgcctggctaattttttaaaagcttttgcagagacaggtccttgccatgtttcccaggctggtctctaactcctgtgttcacgaggttttgctatattgcccaggctggtctcttaactcctgtgttcacaggtttttgctatgttgcccaggctgttctcttaactcctgtgtatgggcaatccaccccctcagccttccaaagtgctagaattataggcatgagccgctgtacccagccacaaatatttttaatattgagaaaagtcagcaactatttctaattttaaaaactgtttttaaaagtaggaatagatggccgggcgcagtggctcgtgcctgtaatcccagcactttgggaggccaaggcaggtggatcacctgaggtcaggagttggagaccagcctggccaacatggcgaaaccctgtctctactaaaagtataaaaataagctgggcatagtggtgggcgcctgtaatcccagctacttgtgaggctgaggcaggagaagcttgaacccaggaggcggaggttgcagtgagctgagattgcaccactgcactccagcctaggctacaagactgagactccatctaaaaaaaaaaaaaaaaaaaaagtaggaatagaaagatactttaatacaaaaatgtattatcgggttaaaagctagcattgtgtttaaagagaaagcaataaaaacattcccattgtatgaaacaagacaaggatacccatgatcgctacaaatgtataacgttgttttttaagttcttgatggtgcaattagacagtaaaaagaaatgaaatgtatgctgggcatggtggctcacacctcttatccaagcactttggaggtctgaggtgggcggatcatttgaggtcaggagttggagaccagcctggccagcagggtgaaaccccttctctactaaaaatacaaaaattagcggggcgtggtggtgggtgcctgttatcccagctacttgggaggctgaggcaggagaatagcttgaacattgaacctgggaggtggaggttgcagtgagccgagattgcaccactgcactccagcctgggcaacagagtgactgtttcaaaaaaaaaaaaaaagatgtaaatattggaaaggaagaggcaaaatttctgtgaggtagcaggataaaattatatgtctagtacacgcaagaaaattacctgataaaaagttagaaacaattaaattcagtaagatggtagatcacaaaatgaatacataaaagcaaatagttttcctattatgataggaaataaatgataacctgttagaaaatacaatggaagaaactataaagcatttatatatgaattaaataagaaatgtgtaggacttgtatgtgcagaattctactgagggacatagaacaagatttaagtaaaggaaagaatcattctgtttttggataggaagactttcgtctaaattgcatgacatcccagtggaaacagcagggttgtatcgttgtttgtttaattaaaaacaaatgacataatgacaccaaagttcatttggaatcatagacatacaagaacaaccaagaaaaacaacctgaaaatgaagataagtggtagagggttcctagttctaccagatcttaaaacctgttaaaaagctggaatagttaagacagtttgatactagagaaaaaaaataaataaataaaaacaattaaacagagtttatatgtagacccaattatgtttggaaatttttagtttctgataaagatgttgtttaaaatcagtggggcaaagagaaattataaaataaatggaactataaccattgcttaattattcagagattttaaaaaaacaattctatctcaatcctcacatccagaacaaattccaaatggatccaagaaggatagaaaaagaaaccataaagcagaggtgaaatttgtaaactttggagcagaaaggactttctaaataagacttgatactggaaaccataacgaatggctaatttgcttactacacagagatataatagaaataagaaaaagacagtaggaaaatggacaaaggatataaaattgcttacaaaaaaatgaatggccaaaactataaaaacattttcagcagtatttccaaataaaaatacagaaatctaaaagaggtgatttttcacatgtcagattagcaaatgttgaaacatttataacccattattggcaagagtaaaaatttaaaaagggtactcatatattgctggtgggaacataaattgatgtaatgtttatagaaggcagtttagcactaccagaatttaaatgaatgtgagattctttgatccagttattcttttttttttttcttgagacggagtctcgctctgttgtccaggctggagtattggagtgcaatggtgcgatctcggctcactgcagcctccacgtcctgggttcaagcgattcttctgcctcggcctcccgagtagcaggaactacaggtgtgcgccaccacgcccagctaatttttgtatttttagtagagatggggtttcatcatattgatcaagctggtcttgaactcctgatgtcatgatccacccacctcggcctcccaaagtgctgggattacaggcatgagccaccgtacccagccctgatccaattattctattgctagtcatttactccttttttttttttttaagctctgttgaacttaatagacatttactctttaaatatacttttttttttttttttttgagacagagtctcactctgtcacccaggctggagtgcagtggcgcggtcttggctcactgcaacctctgcctcccgggttcacaccattctcctgcctcagcctcccgagtagctgggactccaggcgctcgccaccatgcccggctatttttttgtatttttagtagagatggggtttcaccgtgttagccaggatggtctccatctcctgacctcatgatccgcctgccttggcctcccaaagtgttgggattacaggcgtgagccactgcgcccagcctaaatatagttttttttaaaataaaagagttcagtttaaaaaatatatgtaagaatgtttattggcagtattttttttttttttttttgaaacagagtctcgctctgttgcctaggctggagtgctgtggtatgatctcaactcactgtaacctctgcctcccaagttcaagtgattctcctgcctcaaactcctgagcaaagtagctgggactacaggtgcgttccaccacaccggctaagttttgtgtttttagtagagacggggtttcgccatgttggccaagctggtctcgaactcctgacctctagtgatccgcccacctcagcctcccaaagtgctgggattacaggcatgagccaccctgcctagtcttgcagtatttttaatagcaaacaaaatgaaaacaactaatgtgtttatcagtagggaatttattaaattgtgatagtcataagataatattctatgcagctattaaaaagaatgatgtagatttctttttcctaatatggaaagattgcttgatactttatgaagtacaaaaagcaaggtgtacatcagaatgtatattatgacttacttggcaaagtgaaagaaataatagataagcttgtatatgtaaaaacatatttcctggccaggtgcagtggctcacgcctgtaatcccagcattttgggaggccagtgtgggtggaactgttgaggtcaggagttcaagaccagcctggccaacatggtgaaactccatctctattaaaaatacaaaaattagctggatgtagtggcacgctcctatagtcccagtactagggaggccaaggcactagaatcgcttgaacccaggaagtggtgtttgcagtgagctgagatggcaccactatactccagcctgagcgacagagcaagactcttgtctccaaaaaaaaagaaaataataatttcctggaagaaaatacaaaatgatggtaacagttatgaggtatggagcagaatgttttgttttcctttgtttcacctttatttcttttggtgctcttttaatattctcctccatgtttatgtgttacttttgttttttaaaaggtcaacagggactctgggagacaagattttgattttcttctttatctacatctctgaatttatgaaaagtaatgaagtacttttaacagtggtacaaaaatagtagaaaatgtttaaagattattttgttccttataattctcttgattctgttcttttttgtttaggaattaaattttttgtgagagctccaaaatgatgaaatttgaaaataagctctattaagtatactactaagtaaaaagagcctctcaagttttctcctagactatttgaagttattttatctcagaatttttttcttcttaattctgcctcgtaagacagagtactaggaggtacaaaggatagtgatttaatggcactgtttccctagcactgaattattttcacttgaaagaagttggtcactcttcaggaaagtaattttaaagttatttttacctttggttaatttgatttcttaaatagcagttttcttgacaaatttacagtgtgatgacgatacataactggttcagtgagatgaaaatccataattagcttctgttgagactggatgttgatttattacaggattatacacatgaattccataaaaccaaagcaaactttatggcaatacgggaaagggagaatcttatgggatcagtacgaaaagatattgagtaagttactttttatattattttgtagaatatttattcagatttggctttaggatatgttcacggttaattgcaaattgagtggcagaaccgtggttgagattttagggtttccaattcccatttcactgtctttttaacattgctgctacaatgtcatcctaatctacttttccatttttatctcatgcttcctcttactttatcattggctcctgccaaccttgactttcctgtcttaattcaaagtccagcttaggtggttcttcatggttctctgatctcttacctcccaccctaagaattataatgttacttttatgatcctctgcagatgtgtcaaagaaaaaaaaattctttaattgtaacattatcagtaactgaagctccctatgtttctcttcctgattatcacctatcccctggccctctcccttgtcccaacagttacatattacaaacagtaatatgtacaaactcactcatagccttatgttaaattatttaaggactcccaacattctcatactgatctcaatctataattttaaatatttgtttttttcttctgtcccttcacctcacctttaatgatctattctagcatttcatagcatttttggaaatttttttacaactgaacactactgacaaagttaagtcccatgggcgtctcattgaagctgaagatgttccaatttggagccatctaatgatacctgtcatcatctcatttgtgataaattatgtgatacattttataaactatgatacacatttatggtaaactgtatattatgtgtactctcgaaaacactttcctagagatcctttattttattgtaacagtaacagtttcaacagtaagattgttgtaatatttttagtccttcaggacatttaagtcttttgtttaatttccatgtagtccatttatatatatgttttgaggaatgcattgggaacccatataggggatggtctttaatgtatagacactgagcccccccataatttgtgggaatcactagaatgcaacccattgtaataacttgctttttgaaaaatggccataaaagatatgttcatctattcattaaactgtctcctgagtatcaactctgagttagtcacagcagaaggtagaaatgaaaagaccggccaggcgtggtggctcccgcctgtaatcccagcactttgggaggctgaggcaggtggatcacttggggccaggagttcaagaccagcctggccaacatggtgaaaccccgtctctactaaaaataaaaaaattagctgggcgtagttgtaggcatctgtaatcccagccactcgggaggctgaggcaggagaattggtttaacctgggatgtggaggttgcagtgagctgtgatcgtgccactgcactctagcctgggtgacagagcaagactctgtctaaaaaaaaaaagaaaggaaaagaccaatgtggtcctgtaggagtttagaatctaggtgctagaggaaagtatatgtagtagtttacacagtattttttaatgtattatatttttttggcctcatagcaatcttttggttaagatagaaatgatcagtctcattttacaaaactaggtattgagacacttgtctgaggtgaagtggctatgaaatgattcagtatagatttaaatccaagtcatcagtctcctgagtccaatgtgttcttggttatattattctgctttccttggtggtggtttctcctgtagcactgcctttcagccagtatttcagttttaacagcatgttggctgcagtgagccaacattgtgccactgcatgccagtctgggtaacaaagtaagactctgtctccaaaaaaaaaaaattgttcctgatactttattattagtggaaaacagaaaaattaaatttttgatagtagtgataagagtaatttttttgtcaacttcaatacactgaagaccaaaatggttatccttaagtgtgccaaaatgagcaaatctttagcttgatttcagtgttccttaggcttcagttggtggaccacatatattattgtgaaagaaaacatttcatttcaacagctttcccaccctgtgtgctgtgtactaaatcagtcctaagttttacttctacttggagaaaaatgaagatatcagagataggaggtaaaggaaaagtaagattgttttggttgtttgtttcagaatgttgagttattttggtgaaaaacagtaaactgttgggcctaaattagagatgcagaggcattaatatttatctacctaaaatagataacatttttcagagggaaatgcaaaggattatgtactttcattgttcattcaaaactctggagaggctcaatttttctactttcaagatcactagggtcagtcaatctgattttgtattctctgccaaaaatgtttttaaattttctcttttgtcccaggtcatataaaagtgggtctggagtaaacaacagaagaactgagctatttttgaaagaacatgaccaccttcgaaagtaggtattgaatgtatgtgcattatgtggttttccacgtttattaattcatttacttatgtaaccaacattttatgatgtttattatactgagtgccttgtccatgctaattcattttattctcctaatgactcttttcaatagaaaaggaattgcaactgttccaaccataattaggaaagatcctatgctgttgaatatttcacatcacttaattgttaccttaatatggttgttatttttttttttttttctctgagatggagtctcgctccgtcacccaggctggagtgcagtgactcaatctcagctcactgcagccgcttgcctcccgggttcaagcgattctcctgcctcagcctcccaagtagctgggactacaggcgtgtgccaccatgcctggctaatttttttgtatttttggtaaagatggagtttcgccatgtagccaggatggtctccatctcctgacctcgtgatccacccaccttggcctcccaaattgctgggattacaggcgtgagccaccaccgcacccggccagtgcatgtgctaattctctacagagagagactgagacaggatgaaactgaatggaataagagctcctgatgaattagatgagtcgtagagactgaaaagatgggcttcgtcattgccctcagtatgataacacaagcttctaaatacttctcttaaatcaatttttttttgtaattacaaatacttgctaggtaataaaataacattaaaattatcagtaaaatatgtttacaaaataatgtgaaaaactttagtttttcagtgtttttgtatttcatttgccaagtgctttgaggaagaagtggcaagatttttttgaaataactttaaataacaaaagctaaatgcctttcatagtgctcattttagaaagtatggatagttcaacaacacaaaaagaaaattgaaatgacacattactacaaattctgtaatattttttactcttcagtagattgcaagctttttcccatataatttgattttttgtttttttaaaataaatggtgcatatattccataataaagataaaccataaattatgtaaccatttccctaatgttggccttttgggttatgttctgtttttactattatacacagtaaagcctttgtgtgtatccgtcatgatttcctcattctaaattcctaaatcagaattgcaggattaaagaacacactcatttgcaaagtttttctataatattggcaaatttccaagtttgatattttgcagtagggtcggaccttttatggctagaactatgtttaagcttttgcttcttcataaatattgttttttaatgttaatgtaattttttacttgctccaaaagcacatatttttgcctggaaaaagagtaaatcagtttttgtaaatgaatgccatacttaaacacacacacacacacacacacaactttgtaatgaattgtttttaccagctctccttaatactctttttatataaaaataaatgctgttaggttttagcaatttatgttatggatgacaaatttcttttgctatatggtggataaagtaactttcgtttttggcttctctttccctgagtctgtcagtcagaagaaaatactgactttgaattagtgtcaagcttgtaactacttgttttttgctggactgttgatacattctcatagggtttttagttgctatttagataatttctctttctttatgtaattgttctttttcactactccctgatatttttcttcttgaaaaagtatctagttaattttgtatagttcttctccccaccccaagaatttctgcctttataatcttttctttcttttttctttaagacagagtctcactctgttgcccaggctggagtgtcgcggtgtgatctcagctcactgtgccctctgcctcctgggttccagcggttctcctgcctcagcctcctaggtagctgggactacaggcacctgccactacacccagctaacttttgtatttttagtagagatggggtttcactctgttggccaggctggtcttgaactcctaacttcaagagatccacccacctcagcctctgaaagtgctgggattacaggcgtgaggcaatgtgcccagacttttttttttttttgacttgagggtctcactctgtcacccattgtttctctctttgtatttattttatacaagatatatggctttttctggccaacatggtgaaaacccatctctactaaaaatacaaaaattagccgggtatggtggtgggcacctgtaatcccaactacttgggaggctgaggcaggagaattgcttgaacccgggaggcggaggttgcagtgagccaagatcacgctactgcacttcagcctgtgtgacagagcgagactccggctcaaaaaaaaaaaaaaaaaaaagacatggctgattatattcttgctgtctttatagatggagaattaaggagtagagacagacagactatattacctcaaacattgaaatgccataatttatccagaatcatacattcattacttgaccaggcatatgatgctttttctctagaagcattttgtcattttgaataaaatacgtcttctgtatttaccttaatgaagttgacaactttcagaggttttcagtggtgaagataaacttgaataaggagataacttacacaagcagaaaaagcctcatctcttctggattcctttaatgccagtggtcatcaccaggtgtagatcagtcaccttttacccaggctgggaccaccaccttctcatctacaggtgtgtcaccttagcaatcttctgcatctcactgtcagccaacacattttctccttccaagcctctgcagtctcatgagtttgtctgtatttttcttcttataacctaccttgctaccttagccagcctggatctcataggagattaactgaaatactcccaacattgggcctttcctgtgcccctgtcttcctgctgtaccctggcaaaatgccagcccaatccagtctgttgttctacttctgtatgagagggctaaagaaaaagcaactagtcatacagattaactctgttttaaattaactattaaatattttcaacctcatctgagtactctgccttgcctgatgccttttgcttgcctagccctgtttagttctcattctcttcaagaactttaccaaatcttctccttccccctcttgaccttcctgtctcttcacctgatacagaggttcttagcttccacttcattgagatttttaaggttttgatcttttctataaattgacctataggagtatccctctttacccctttcctatagttgttaagggatggaatatttgtcctgagaaggccaatacgtgcattggacacttgtctctatccccatttgctgtgtaagtatttgactcttcagccatccggtacactgtctctggtttacacctgctgtctctgtgtcagcactcattcccgctttagcccattgacttcttccctcacaacactactgaacttgctgtcaataggcacatcagtgatctcctgcatgccaagtctcatggacatttttcttcatgttgtttggctgctgctctgcctgacttgatatcatagtctcctttccttgaaaccctaggctactgtggcactacactttactgattctccacatacctttcttacttctcttttgtttttttcctgagtccctccagatgtggcctaggaatccttttaaacacagtgttccaggcagaaattagttggagttagttcacaagatgcaatttatttgccatccacccttgcatttcagctccattatttgtccttgacatgcttgtctataaaaacactttctccttcccagagatggcagctaacaatacctagcaaagagaaatgggaatttcattcacaatgtcatagggaaagcaattggtaaaattattttactgccaaggataataagattagagagttgaagaaagaggcatgaattctgaaattgtatagaaccatctaaaaggtaaagctgaggagttttatccatacttaacaggctgtgactgttttcatagaagtactctctgatttatgggcatgtcattgattacaactagaattgcagattgtgcacattaaacacatcagcttaaaaatccttgacattttaaaaatacctttggcagagttttagagtagtcatgatatttaaaatattatcctaatttgttggtttcctagagtatattttcatttaatcatatgtatgataagaacatacagacttcttgctgggggcattggctcatgcctgtaaagcctgtaatctccgctactcaggaggctgagttgggaggattgcttgaggccaagactttgagattggtctgggcaacatagcaagactctgtctctgaaataataataataataaaaatactaagtatatttcttggtttctagggttaattttttttcatcttcctctcattaatttaccacttttatctgactaagataccttaagtttctttattccttggattggtagtatagtgaaatgattagggcagggctttgaagccagagagtcctgggttcaaatcctggtgtggactctatctttttggggtaagaacctttaaattctctgactttccagtgtcttttaaatgggtgaaataacccttactttatggaatgttgcaaagatgagagaggatgtatgtaaaatgttaacctattacagagcttgatatggagtagacgaattctaaaattacattgagccattttgcctatagtggtgttagaatagaaaagtatactcatacattagaattgtgcacctagagctaagtgattccagccctgtggaacccgtcaatgccagaatggcatgtaggactagatagatgaatgtcacctgaccctgattgtctattaaaactcaatgtatggccagatgcagtggctcacgcctgtaattcccgcgctttaggaggccgaggcaggaggatcacttgaagtcaggagttcaagaccacctggccaacatggtgaaaccccatctctaccaaaaatacaaaaataagccaggtgtggtggcaggcgcctataatcccagctacacaggaggctgaggcaggagaattgcttgaacctggcaggcagaagttgcagtgagctgagatcgcgttactccatgccagcatgggtgacagagcaatactccatctccaaaaaaaaaaaaaaaatcaatttatttttaaattactcttattagtcattagtcttattatatatcagtataatgaacattttatttattcaaatcctttttttttttagatggagataataaaatttcagttgcattccacctgtttcttcatgtgcatatccggatgcacatataatttgttggtaccagttttggttgttttaacgagcatttgttgagcatctatgatgtggaaagtattgtgctgggtgctggagatagagaagttgagtaaagcatagtggcatcatccctgtcctcagtgagctcagccaggtggggtggggagcagaaaagaaatgtgaatcggtagttccagtgcaaagtaataagtgctttattatgatatgcaaaggtttgtgcgtaccctagaggagcacatgaaagggagtcattactctgctgaagcttctgaaagggctttagagaagtcgaacatctgatctggttcttgaggaatgagtaggtgttctccaagtagagatagaaaaagattgaaaagttgaaactcagacctcatgaccatgcctttgtcttctcttcttaaatccgtatcattcctcatacattattaaatggatctattttgaaacgtcacgcatttactcatagtccaaaccctctcccaggttataggtctcactctggcacctgaagaggacacactgggcaaaagaaagtgagcagtgggggggctctgagtgtcaccggggtcagccgaggctgccattctttttcctcataaatcagatttactgaggtagaatttacttacagtaaaaatgtatccattttaagtttacagtttggtacgttttaacaaatatatagactcttttaaccgccaccacagtaagacagagaacatttctatcaccccaaaaaagttccttatgccccttttgagtcagtccccgtccctcagtcccgggcagctgcttactggctttctatcactatagattagttttaccttttccagaattttatacaaatgaattcatacagtctgcacttatttcacctagcatagtgtttctaagacttattctttttcttaaatgtcagtaattgatttctttcaatagcggaataacttccattgtatgatataccacgatttctttatccattcaaccattgttgcacagttgggttattttcagtttttggctattaaaaacaaaattattatgaacattcataaacaaaactttgtgtggtcacatgttctcattcctctttttttttttttttttgagacggagtctcattctgttacccaggctggagtgcagtggcgcaatcttggctcactgcaacctccacctcctgggttcatgacattctcctgcctcagcctcccaagtagctggaactacaggcgcatgccaccacgcccagctaattttttgtatttttagtagagacggggtttcacggtgttagccaggatggtcttgatctcctgacctcgtgatccacccgccttggcctcccaaagtgctgggattacaggcgtgagccactgtaccctgccgttctcatttctcttgagtaaatacttggagttgtattgttgagttgtatggtaaggatgtgttccaatttataagaaagtgtcaaacttttccaaagtggttataccatttttgcattcctgtcagtggtgtgtgggagttcaaattgctttaagcccttgccaacacgcctttctattgtaaccattttagtagaagtgtaatggtttttattgtggttttgatttgtatttctctaaggactggtgatgttaagccttccttcaagtgcttattaaccattcacgtatcttcttttttattattcacaactcacaggttattgtgacatttgtatatcttctttagtaagggggtctgttcaagtctttttgccttttgttgtgggcttttttctattgtgttataagggttctttgtgtactctggatgtaagtcctttgtcagataaaggttttgcaagtattttctctgagcctgtgacttccttttcttttcatctggtgactttcaaaagagccgaggtttttaattttgatgaaatctggttgatcagttttttctttctgattcatgtattttggtcctatttaagaaatcttggctatcctaaggttacagatttttttcttttgttttctttcaggagttttagttttagcttttttgtttgtttgtttgtttttaaacctgcagccaacatcatacagttttagctttaacattaggtttataatccactttggcttcacttttgtgtgtggtgtaagttaagggtcaggattcatttttttttaaacacatgtatattccattgtttcagtaccatttgttgaaaagactcttttcctctgtttaatcttttcaaagatgttgacatctttctagagaattaattggacacttgctagtttatttctgaactttgttctgttctgttgacctacagatccatccttaggctagttgtactctggttactgtagcttcataataagttttgaaatgaggtagtgtataagtctcctaactttatcatgtatcttcaaagttattttgactcctctgggtcctatgcacttccatataaattttaatatcacattgtttaaaagcctgctgaaatttcaaataagattatattgaatctagagatccatttggagagaattgacatcttaacaactgtaaatcttccaatccaggaacaaggtcttatatgaaaatatacaaagaactctttttttttttttttttgagacggagtctcgctctgtcgcccaggctggagtgcagtggcgggatctcggctcactgcaagctccgcctcccgggttcacgccattctcctgcctcagcctcccaagtagctgggactacaggcgcctgccacgacgcccggctaattttttgtatttttagtagagacggggtttcaccgttttagccgggatggtctcgatctcctgacctcgtgatccgcccgcctcggcctcccaaagtgctgggattacaggcgtgagccaccgcgcccggccacaaagaactcttaaaattcaacaattttaaagtggaaaaaagatctgaacagccatcttaaccaaggaagatatacagatgataaattaagcatgtgaaaagatacttaatgtaattaagtatcattagggtactgcaaagtaaaacaacagtaagataccactgcacaactgttagaatggctaaaatccaaaacactgacaacattagaaggaacactgaaggaagtggagtaacaggaactctcactcattgctggtgtgaatgcaaaatggtacagcgacattggaagacacttacgcagttttgttttctttttcttttttttttttccgagacagagtctagctgtgtcacccaggctggagtgcagtggcgcgatctcggctcactgcatcctccgcctcccgggtttaagcagttttctgcctcagcctcccaagtagctgggattacaggtgcgtgccaccacacccggctaatttttgtatttttagtagagatggggtttcaccatcttggccaggctggtcttgaactcctgacctcgtgatccacccgccttggcctcccaaagttctgggattataggcatgagccaccatgccgagcctggcagttttcttaaaaagctaaatatggtcttaccatacattctagcagtcatgctcctagtgatttacctaaatgagttgaaaacttacatttacacaaaaacctgtgcatgaatgttttacagcagctttattcataattgccaaaaagttggaagcagtcaagatgtccttaaataagtgaatggataaacaaatggtggtacatccatgcaatggaatattattcagtcatacaaagtaataagcctttaagcctggaaaagacatgggggaactttaaatgcataaaagcagccagtctgtgaaggctacatactgtataattttaactatataacattttggacaaagaaaactatagagacagtaaaaagatcagcaattctcaggggttgaggatgggaaatggaggaagaatgaataggtgaagcacaggatacttagggcagtaaaactcttctgtatgatactgcaaggatggatccatgacaaaacccctaccaccgtgcaatgcaaagagtcaactctaaagcatggtgtttagttagtaatttatcagtactgggtgatcagttgtaacacatgtggcacactaaggcaagaggtaatcacaggtggaggagaacgggtgtatagtgtgtactttctactgaatatttctatatgtctaaaattgttctagcaataattctattcattttttaaaaaggaaaaagtgattttctaggatctcactgctaatgactcagcttttatttttttattttctccttgaactgagcaggaatctgtcaggtgcttcactttctgtctcccggtaacttgctgtgattatgaaaatgtttgtgctaaacaacccatgaacaaagcaaataaagatattccttcatctacccagactgaaaggaattatgccaccatatcagtgttaatggaagagaggttacagctggtttccactttcatctttgttttcctgtattttccaaatgtgctctgtaaaataaaaagctcttagcactaaaacagtatatatgtattctactgcagcttaattgtattcagttaacataattgaagagattaaataagaaatgtagaaataagtaagacgtagatcttaaggatctctctggttaactgtaagtgaaagactatctcaccacaatgcttaatgtaaatggtctgattggttagtgacaacctcatcaattattgcagcatgcaaagggattgatttttaaatttttatttattattcattatttagtatgtacttgcttgtttgctttcttatttagttgcttatttatttgcttattactttcctaccattttaaaagaggaagaagatactatctaagtgattttgccaagttcttacattttgttggtttatattgctttaaaatacatgcttgaaatcacatgtttgctcttgaaatgtgtgccttttgtagtgtgtgtgttgggggaaataagttattttttaaaaagagaattatttaaatatggctttagtgattcctcagcacgataactggtgatgaaatgtagcttattgttttcagctagtttaaattggtcttgagacaaatggaaatttgtttcttaattacaggctctagatgactttatagaacatctctgggctattatcaagtacttgcttaaaaaggacaattccacttgaattatatattttataccccaaaggaaaataagtttaaatttaattttaaccagatgatgccatctgcatggagtcactctgttgtcgtgtccacacgtccaggatatgtttaatgaatggtgtttgtttactttatttggtcttagccaaatgagtaaagacctggagactgggcaatttgagaagacatttaggaatccctggcttttctctgttgatgccaccatataagctaaggatgacagtgggtagggaatgtgtgtggaattcctgtgtgattcactgtaactgtggtgtgctaaatgcatggttaagctagtgtcagcatcgtcttcctgtaagttaaagatcccttctgtgagcaggactcctgcgtactcatgtatattttgaaatatgctttacaggatattttaggacttaataaaagatgactgatgtgtaaggggacttaaaaggaagaaaaaccccttcttctgtagggtagcatatttgggattataattttcattttctttaggttggtttcatttaacttttttttttttttttttgagtcagggtcgtgctctgtcgcccaggctggagtgcaatggcacgatctcggctcactgcaacttccgcctcccgggttcaaggaattctcctgcctcggcctcccgagtagctgggattacaggcgcccgccaccacgcccgtctaatttttgtatttttagtagggacaaggtttcactatgttggctaggctggtctcgagctcctgacctcaggtgatccacctgcctcaacctcgcaaagtgctggaattacaggtgtgagccaccacacctggccagttggtttcattttcaagtgaatccagcaaacactcttttctttgacttgtagttccagtattgctgtaaaattactgtaatttgaggatagttgtcaatctcaaatatataaaatgaccaatttcagtgaccatttatccttttacgaaaacctattctatgaaaatccaattttgtgcaaaaagtgggaaataagtggggggcgtaagtgtttgctttatgagactttatttgattcatgtaaatagaaaatggtttcattacatgtaaaatgtgatttaaattggtcaaaatgtcattttcggaaagtatacctaagatgtatgtactcattacgtaatgagtactaaaattgggtctcattacacagaacaaggattctatctgtgtgccacaaacaacttcaaagaattttctttatatgtaatgacacagaaagttgttccttagcgtccatttcaactccagttcctcaggaacattgaatacaaattataatgagtttattttccaactaaagtgtagtagttaggctagtttattagctagtttagttctgacctctatggttgagaacagatacaagagaattatagaaagcagatagtggaaatgataaagtgtacctggctggctttctgacgatttgtgtgaagtgcttggctttgtaattttatatttctttctaggctgatacattgagtttatttagttagaagtgtatttccacagactgattatctgtttttttaaatgcttcttcacagttgtataccacttaaggtatgtagctttgtagccaatctaaattggaattgggtttttgttattgtcgtttggtacattggtcactttataaatgtttaactttttgttttgagttaattatagatttgcatgcagttttaagaaataatagagagaggccgggtgtggtggcttatgcctgtgattccagttacttgggaggctgaggcaggaggattgcttgaagcccagagttcaaagatgtagtgagctgtgatggtgccacagcactccagcctgggtgacagtgagaccccagctctacaaagaaaaaaaataataatacaaagaaatctcatgtacaggcctaccaaattttgtgttttgctttattgcactttacagatactattttttacaaactgaaggttggtggcaaccctgtgtcgaggaagtcttgcagtgccgtttttctaacagcatatgctcacttcgtgtctctgtgttacatttcggtaacagtattttagatgttttcattattatcatatctgttatagcgatcagtgatctttgatgttactcttgtaattgcttacaacctcactgatagaagagggtgaacttaataaatgttgtgtatgtgtgggggtttttttgttttgttttgagacagggtctttctcagttgcccccaggctggagtgcagtggcatgatcccagcccactgcaacctccaccttgtgggctcaagcaatccttctacctcagcctcctgagtagatgggactacaggtgcacaccactgtactcggatatcttaaaattgtttgtatagacaaggtctcattatattggccaagctagtctcaaacacctggggactcaagtaatcctcccacctcggcctcccaaagtgctaggattacaggcatgagccaccgtgcccggccagttgtgtgtgttctgactgtgtcatccaccatccattcccaactcactcctcctcaggcccctctctattacctgacacagaacagtattgaaattaggctaattaatgactttgcagtggcttgtaaatattcaagtgaaaggaagagttgcacaactctttcaatcagaaggcagaaaccactacctttagtgaagaaagcataccgaaagccaatctaagctgaaaactaggcctcttgtgcccgttagccaagttgtgaaagcaaaggaaaagttcttgaaggaaattaaaagtgccactccagtgaatacacaaatgataagaaagcaaaacaaccctattgctgatatggagaaaattttaatggtctggttagaagatcaaaccacccacaacattcccttagcctaagcctaatccagagcaaggctctcttcagctttatgaaggttgagagaggtgaggaagctgctgaagaaaggtttgaaattaacagaggttggttcatggggtttaaggaaagaagccatctctataatatagaagtgcaaggttgaagcaggaagtgctggtgtagaagctgcagcaagttacccagaagatctagctaagatcattgataaaggtggctccactaagcaacagatgtttagtgtagaataaacagccttttgttagaagaagatgccatttaggactttcctcctagagacgagaagtcagtgcctggcttcaaagcttcaaaggacagctgactgtctttttaggtgctgatacagctggtgactttaaattgaagccattgtgtatttaccattccagaaattctagagcccttaacagttatgctcaatctaccctgcctgtgctctctaaattgaataacaaagcctggaagacagcacatctgtttaccacatggtttgctgaatattttaagcccactctggagacctactgctcagaaaaaaaagaattatttcaaaatattactactctttgacagtgcacctctgatggagatgtacaaggagaggagtgctgttttcatgccagccgacacagcattcattctgaagcctgtggttcaaggagtgattttgacttttaagtcttattatttaagaaatacattttgcaaggctaaagctgccatagatagttattcttctgatggatctgtgcaaagtaaattgaaagccttctggaaaggagtccccattctagatgccattaagaacattcatgaggaggtcaaaatatcaacattaacaggaatttggaagaaattgatttcaaccgtcatgaataactttgaggggttcaagccttcagtggagaaaataactgcggatgtggcagaactagcaagagaactagaattagaagtggagcctgagctgggtgtggtggctcatgcctgtaatcctgtaatcccagcgctttggaaagccaagaggagcggatcacccgaggtgaggagtttgagaccagcctggccaacatagtgaaaccccaactctactaaaaatacaaaaattagctgggtgtggtggtacacacttgtaatccccgctactcgggaggttgaggcagaagaatcacttgaacccaggaggcgaaggctgcagtgagccaagattgtgccattgcactccagccagggcgacacagcaagactctgtctcaaaaaaaaaaaaaaaaaaaaagttagaaagcggagcctgaagatgtgactgaattgtgcggcaatcttatctcatgataaaacgtaaacaggtgaggagttgattttaacagataagcaaaagaagtggtttcttgagatggattctactggtgaagacgctgtaaacattgttgaaatgacaacaaaggattcagaagagtgtagaaacttagttgataaagcagcagaggggtttgagaggactgactccaattttgaaacaagctctactgggggcaaaatgctaccaaacagcatcttatggtacagagaaatctctcaaggccccagtttttcctaagtgaagagaattttagaatcaatctcatagatttgttgggaggatgaagttatgttttaacttgtttagtaagacatttaggataggacgtggctcatagtaagctctctgtgagtattagctatcattattcttaacaaaattagtaaattaatagattgtttgctcttttttactttatttagtagtttatttcatttattttatcttcattaaggctgttggcacaaaactagtttgttgatttgggcaatataaatctttatgttcatattatacttcctagattttggaatatcttatgtttatgctctttaatgtgctaagtggccctgatgaagacagtcagccaaaccattatattgaagaaggaggtattaacccaagttaacccccttttttgtgaccttgtggccacttcaccagatgccttttggcatgtgtcttgtctatctccattgtaagatcttggcaggttagtgccatatctttgtagccactttctgacccagtgcccttcaggggtgcttctatacatgtttgttagaagagtaagtgcatagttaataatcatagatttcatcagaatagtgagtttatctggaaatttatatcaattttctgcttagatttacaatgtgtagttattgagaaactaatagcaaaaaatacttgacacttactgtgtgccaggtactgatccaatcactatacaaacccctttatttgaacaagtaggttttattatccttgctagtctacagatgagaaaactggggcatggagaaacttgccctgtgtcaaataactaataagtggtagattcagcatttaaatagccacagtctgtctttcactaccgtctttgtaatttttgaaatttttaataacaggatttatatatggtatttatgactttttttttttcctgagacggagtctagcttgtcgcccaggctggagtgcagtggcgcaatctcggctcactgcaacctccacctcctgggttcaagcgattctcctgcctcagcctcccgagtagctgggattacaggtgcccgccaccatgcccagctaatttttgtattttttagaagagatggggtttcactgtgttgggcaggctggtcaaggactcctgacctcatgatccacctgccttggcctcccaaagtgctgggattacaggtgtgagccaccgtgcccagctaaattttgtattttttagtagagatggggtttcactgtattggccaggctggtcaagaacttctgacctcatgatccacctgccttggcctcccaaagtgctgggattacaggcatgagccacagcacccggccggtatttatgactttttaaagctcatttgttccctaatatatgcagtaacttagattacctagtccactaatttataatgaaaccttgacttcgtagcatgaacttagaaattcttttggaaataagtagttggaaaaatacatgcagatatttatttgagtgcctactgtgtactttatgccaagtggatacagatgtctagaagtttgttttcctacttctgctgtaaagatggcccttttccaaactttacctattcatttctccctaaaatggctttgtttgtttctttctttccagtgtgtgctgcataaaggcagacaatttacagataaaaggtgtatttggtttcttaagattcttgaattctaaagtttagtaagctgaaattttagttaaaaaaaagcctgtttcccaaaaaagaaataaacattaagatgtaaatatttactacttatagacatcagaattatatttgcctatcctgtctcaacaagttggttctgattcttaagttctgaatagatgatagtgacaactttgagctatttaaagagaaagttcatttctttatgctgtcattaaaactgttctgactctaattgtcaggtatctctgtggaaaaaatagatttaagctaacgaaagtgagatagaaattatttgtttggagtttttttgagacagagtcttgctctatggcccaggctggagtgcagtggcatgatgatttcggctcactgcaacctatgcctcccgggttcaagcagttctcgtgcctcagcctgccgagtagctgggactacaggcacacattagcatacccagctaatgtttgtatttttggtagagacagagtttcgccatgttggccaggctggtctcgaactcctggcctcaagtgatctgcctgcattggcctcccaaagtgctgggattaccggcgtgagccaccgtgcctggtcgtaagatggaaattatatatattgtatgcgaatgaaattaaatttatttcgaagtccaggccagccacagtggctcacatctgtaatctcagagctttgggaggccgaggtgggcagattacctgaggtcaggagttcaagaccaccctggccaacatggcgaaacctcatctctagtgaaaatacaaaaattagccaggcatggtggcgggtgcatgtattcgcagctatttgggaagctgaggcaggagaatagcttgaacctaggaggcggcagctgcagtgagttgagattacactactgcactccagcccaggtgacagagcgagactctgtcttaaaaaagaaaaaaattagagtccagaattttctccagatgctttgaaaaagctagacattctgtatacataaatgactaaaaagtttatagatgtagaaaaattaatacaggttttacatgtgcatttagtaaattcagaatttgaatttttctttttatttgcagctcagatcgtctgatagaagagacaataaggtaggaataagtttttgttttgctttgttggtttttgtttgtttgcacgtaaatttaatgaacagtgttacagctgttttagaattaaagaaaaaacattttaatgaacagatcaaagttcgtttatcctccttaaagatgaaatttttactatgtcctttccttacaagagacgtttgacacccaaagtaacatttccatagttactttaattaagctgttttacttaggttaatttttccaattaatttatacttaatattttcaatctcagtctttttattcccactttttaaagcaaagtgatttaaagcataatttgataaataactttatgccattcatatagactttgctgttatagcacctgcagaaaatctactgcagtaatagttcatagtatctgtaataacattgaactagtttcttgcttaagttaagggacatttatttcttgttttgaactgcttagctttctaggtttgatgaattttaaagtatctattttatgacagtaaaaaagtacattaactaggtctctgtgctctagaattcaccaatgtgtaaagcattggttttcaggaaaggtaaatcaaagtacatgacaataacaaacatttgtatttttttttttttttagatggagtttcactcttgttgcccaggctagagtgcagtggtgccatcttggctcactgcaacctccgcctcctgggttcaagtgattctcctgcctcaggctcctgagtagctgggatttcaggtgtgtcccaccatgcctggctaattttttgtaattttagtagtgacagggtttcatcatgttggccagtctggtcccgaactcctgacctcaggtgatctgtccaccttggcctcctaaagtgcagagattacaggtgtgagccactgcgcccagccacatttgtattcttaccatggatattggacctgtgctaaaagtactttgcatgcattattttatttgattttctcaataacccattagatagacacaaatcattaggaactatctccaaaacaaaaaagaaattaagtaatttgcctgtggtcacatgactagtaaatagtattaaggattcagatcctgattcagtcttagtccaactctagaaacagagctctatttaaaccactgctatatttaccacattgcagaaagaatacaaggttttgggtctgatttggtttggaacctgcctgtgctgtttattagatcttagatttctgttctttagataattaacttcttggaactttcattttcttatctgtttaaaaatatagtattgatgataatacttatctgtaagactgttaaggataatgtgaggaaaatgcctgatctaatactaggtaatctgtaaatggtagctatattattaataccaatcctttcttttttagctttttatttggatatcatttcagatttcagaaaaatttcagtagtgaaaagaagtcctatataccctttacccaacttctacaaagtttaacatacattgatgctctttactcctaaatatttcagtgttcgtttcctaaatatctgtttcttttgtatggcttcatggattctttattcagtggattggaatattttccatcattaatcatcttaatacattttagtcttttataacagtaagccatgattgtgtcttgaatttttgtttaaattgtatgtgctgagccttccacctgaagaaagttttcacagaatttccttatgttgactgaagtttcttccttgtaactttttccttttcatcagcacatgagatctgatcacattttgccaggaattctttacttaaagtttcccaatcatcctttttcttttttcctttatttccctttctttctgcctgctcttctagggccaggctgccttaattaagctttcacttcagaactggcctatttaagggctggtaatatgagtataaaaacttggggtacctcatagggcaaaaaagaaattaaaaggaacaattgagaaccattgaattgttactattattttgctagttagaaaacatgttattaggtcttttatttcagtattttcccttgtttcaaaatatgataggcattacaagaaaagtttcactgagtataaagctagttatgatttcttatgaagaatataaagtttgtgtcaaatagtatttttgcatattccatatggaaaaatttaccttttccttttagagatacattttaaaactatgtgagcaactgaatatagactttgacatcaacttattgaaaagaactagcatttttaacatttataaattcatttctaacctttaaatgtatgacttgtattatctgttgttgaaaaaaaggtgactgagttcagttcacagagcaggtaacaggtaagaaagttgaagttcctgtaagcatatcaatgatttatcattttaaaagcattatgtattatttagagcttatattttgcttctaaatatttgacccttgaaataacagcctagatttcattctgcttgactctgagtcatgaaatgagatgagaaagtatgtctagatatactttgtggtactggaaatcatgcatcttcaacaagttaacataatgtatgatgatgatatctattccccaaggaatacaaagtgctttgcagaaattattttttaacctctgtccacttgtgagtcaaagtctacaggaaatggtgatagttccagtttgaaaaacagaagcaggcccagcatggtggctcacacctatgatcctaacactttgggaggctgaggcgggaggactgcttgaggccagaaactcgagtcagccagagcaacatagtgagaccccatctttacaaaattgtttctaaaaagctaggcatggtggtgcacatctgtaagccaaccacttggaaggctgaggcaggaggagcacttgcacccatgaggtcaaggctgccatgatggtgctactgcagccgtgcctgcatggcacagtgaggccgtgtctcaaaaaaataataatatatcattcaaagattgatatatgggccagcataggtttgaaagctgttactttatacaagaccatagtatctacttgcaataccttgtaaacttttctacaaaacagccacattttcaatgtatcacattttgtcataatctctcaaactgaaaaattatgaataagaactaaatgatgcaaaggaagttgtttgttaagctcttcttgtgttcctttcatttggggatcaaaaattcagtgtattgtgtggttgacatcgctccctccttctgctctaatcttgactggtgattctctacacctccaacattgttctggtcctagatgtccttcctccattaccctaaaataatttcctctattggattacctacttgggattagtgccttccactttcttactttattcccttattatgctgaaccatgtccttagtaacttcctgagaaagaacaggaggtaaattgttttggactgcccacatccaaaaagtctttattctgctcgtattcttgattcattatttaacctaaccaagatagaattctgagttggaaataattttgaaatttttaaaggcattgcttctaaagtccaggctggcatgcttctaaagtccacagtggcatgcgtcttttccagtccaatgctctgggcattgagtgaactcttacaatctggaaactcatcttcagttcttggaaattatcttaacgttctttatcattttcttccctcttctttctctgttgtttcatgcaaaaaaatattaaaaaggttatgtgttgggccttctgaattgatcctttcttaccttctctctgtttctgttgatctttttgtttaacattctgggagatttactgaatttctccttccaattcttctattacatttttatatcagctcttcatttaatttacatgagctctttcgtgagagacagatacacacatttatgtgtatgttttgtggatgtagtaatcttttatctctctgaaaacattaaatgtaattttattttagagtttcttgagcttcctttattgccctgtttgctcagcctcacttttctgtttgctgggtggtttatttgaactctgcctttcatgttacctcctcacacatctagtgattattggctgttccttcatatttaagggtgtgactccaaaagaggatgagcttccagtcactcattgctgttacccaggctggagtgcagtgacatgatcatggcttactgcagccttgaccttctgggctcaagcaatcttcccacctcagcattctgaatagctggtactactggcacacaccaccatgcccagctaattttttttttttttttttgtatttttctgtagacatggtgtttctccatgttgtgaaaagaatgtgtgttgggaaactcatcctgtgagcatagggtggtgacacttgttgagtgttaggcctcaccatgcgtgatcaggcggacctggctgtttcactggggacttcaaattgccagacctctatgtctcttctcctgagctaggtcttctactggactaggggcagccacctagctgcatgcgttaggaagggcaattttgggttatggcaactccttgtacaaatttctacaaatctccatttttaaccctactccacagttctgccctcagagagagtgatcccttccattcttgagcatttctgagatctgtggaaaactttttaaaatcattgcttgactcataattttattgaggtgcatcacagtggtggatttggagctgctaatgtatttttttgtttgttttagttttacccagttacatttctttattctgaaatgtcatttcaaaagaccagaccataatatctccacatgaacagatatttttctagaataggcctaaaagtattgggaagatgggattgtcagcattaaaacacataggaaatcaggaccctggaagaactgtaatattctctaggacttttcattttctaaatttgcagatattgcctgtgatttcagttgaaagtgatccaaatcctagtgtgtccatgttaattgtgtgtgtagcttcaaatgttatttaacgtttcttaatcaagtggaatttttctaatgttttcatttttcttttattagacacttgtatattgtatattatacaagtacagtgttcttattgtaacaacttaaataatactaaaacggataaagaaaaagtcagccgggcgcggtggctcacgcctgtaatcccagcactttgggaggctgaggcgggcggatcacgagggcaggagttcgagaccatcctggctaacacggtgaaaccccgtctctactaaaaatacaaaaaattagctgggcgtggtggcaggcgcctgtagtcccagctactcaggaggctgaggcaggagaatggcatgaacctgggaggcggaggttgcagtgagccaagatcgcgccactgcactccagcctgggtgacagagcaagactccgtctcaaacaaaaaaaaagaaaaagaaaaagtcagtctcctggtagtacccctccattcttaacccctgaagcaacttgtgttaactgacagttgtgtatccttctgatacctttttcactgtcatacagacatccccaaagatgtttgtttctgtaattattagaggattcatattctatacattctgtggcttgctttaatcactcaatatgttataaacatcccttcaagttaatagaaatactaactttgttttgttttgtttgagactgcgtcttgtgttgtcacccaagctggagtgcagtggcgcgatctcagctcactgcaacctctgtctcctgggcttcaagtgattcttcaccctcagcctcccagtagctgggattacaggcgctcaccaccacgcctggctaatttttgtatttttagtagagaagaggtttcaccatgttggccaggctggtcttgaactccttggcctcaagtgatccacctgccttggcttcccaaagtgctgggattacaggcatgagccaccgcgcctagccctaactcatttttttaaatacccaaatactatgtaatcactgcctgtgatttcagttgaaagtgatctaaatcctagcatgtccatgttaattttgtgtgtgtgtgtagcttcagatgttgttaacatttcttaatcactcaggtgggatttttctaatgttcttttcatttttctttattagatatttatatattatcgaagtacatttgtatattatcaaaatgttcttattgtaacaacttaactaatactaaaatggataaaggaaaagtcaatctcctggtagtacccctccattcttaacctctgaagtaacttgtgttaagtgacaattgtgtatcttactgatatacaactttttcactgtcatacaaacatccccaagggtgtttgtttctgaaaatattacagcattgatattctgcacattccgtagcttgctttaatcactcaatatgttataaacaccccttcgtgttaatagaaataatactaactcatcctttttaataaccaaagtatggttatatcataatctattataccattcaaatgttacttccagttttgggggattttttttttttggtctttttgctgttgttgttcattttttactattccaaaaatgcttcaacaaatattcttttacagattgaatgttgcttatccaaaatacttgggaccagaagtcttggggatttctgattttcagattagggatgttcaacctgtatatacctccttacacacttttgtttctcttttgccatctcaaatcttgaaattcaagttttgattcatgtgtcatttgtttagaatattccttctagcatttcccttcaataagatacatggtggtttactctgtgagaccttacctggccaaaaatgtgttcactcagctcccagatagatccagctatgagagcctcttaagcaatggcatatcaggcagtgatgcatccatcactgggctcttcccttaggggctgggcatcacaccagctacaagactatcggctctctgcttgtcatctttctggctgcatgtagcagtcctttcccagcttcagtgcctgggagcaatttcactgcaacccctgtgtatgcagatccatagtcttccactgtctgggttcctcaggaagcaaggaagccctaggtctttgcctcaagcttgaagaaaaatctaagcttccctgctgtcagttccctggttctctcttcacttcagagagtatagccctctacctggctttcttccctggagatctcaagggaacttggggcctcagatggaccctccttagtgtgtctgcttttattcttgtgctactccatggaggaaatggaccaaaggtcaagtcaggaatttatactctcaccatcatcttccccaaatctcaatctcttgatttaaaaaaaaaaaaaaatagatattttcaaaattgctcaacagcatttcattttctgttgctatttataatgtcaacatgcaaagcactcctctgagtgttacatatcaaagtggatactgaccctgccctctagggctctaatgtccagagagataagactatgggaaatgaataatcctggaagtgatagcaaaatgatactaacttagggccaagcttggtggctcacacctataactccagcactttgggaggcggaggtaggaggatggcttgagcccaggagtttgagaccagcctgggcaacatagggagaccccatctctagaaataatttaaaaattagaaaaaaaaaattagccaggcatgatggcacatgcctgtagtcccagctactcaggaggctgaggtgggaggattgcttgagcccagggagtcaaggctgcaatagccacagtcacaccactgggctccagcctgggtgacggagcaggaccctgtcccccaacccccaaccccccccaaaaaaaggatattaactcaagagatcttttaaacaggacatcaaggtagtcacagggaagagattgtgttcgaccaaaagtgactttctcttttctctttaatcttttcttttttttgagacagggtctcgctccattattcaggctagagtgcagtggctccatcacagctcgctgtagcccccccctcctgggctcaattgatcctctcacctcagcctcccgagtagctgggactacaggcacacatgtctagctaattttttattttggtagagttgggatttcaccacattgcccaggatggtcttgaacttttgggctcaagtgatcctcccacctcggtcttccaaattcggtgctgggattacagacgtgagccaccacacccagctgttttagccacgtttaatgagtctgtgacctttgtcagccatcatggaaacccagcataatgttgcatgcatgcctagttggttctcaagtagaattttggaacataatctcttcataaattaagggctggttgtgtattcacattttatgatattttatatttcttttctatttttataattataattccctttcaacagtttttcctgattaaagatattttagtagctggcttctttttaaactctttttaaactttttaaagtttttaaactttaaattttaagaagcttttgtaatatgtgatttgtctgtttatgccttattttgtttgttattttgaagcaaacataggaagtggcttactgccttgtataaaaagatatcagagaacagtggagtcatttggaaaaagcgcagtggtaaagtggcttcggaagtgattttttccccttattttctggcacagtgctttctaagatgatgttgctcactgtagttttctttcacttttaaaggcatgatggttccaggcaggataatcttaaatggtgatttgtcatctttttttccccttgcagcattgctatggcaacaaaagaaaatatgacttcacagagaggaatgttgaagtcaattcacagcaaaatgaacactttggccagtatcctttttgaatgttcgcagtctgtgttttgagggtagaggggagaagtgtctgtgtgtgcttttatagggggcaggttgccatcatcagtagcagtagagcccatcagtaattgcataatatgaatatactgtgcattcctactttgtgaaagtttatgctctttagtaccattcctaaaagactgcacctcagaagtttcttactactagatgtagaagaaaaaaattataaatgtgaatttaaaaattatccaccaatttcttctacattttagaaagcttttaaattcatgttagaactccacactatacattattcttacctaaacatgataaattatatgcctttgttgtttttcccatttagagataagtcagtggcagatgcttggaagggggaaggaaggagacagccacccgtgcagatgagctatagctactgatggagtttgtaactctatgcacaggctgaattctaggatacattctccacttgtttgttgtaacctctactttaaaatgtttcagttttctgttttaaattaggattattaatacttcccagaaacccactagggaaccagaaaagcctggcactctgagtcatttcattcagcgaacctctgaaaagacaagccttctaggcaaaaagctttcctccccaactgccaaagggggaggaacctagaattttcaaaagctgagtatcttgtagtcctagataatttgagttcacttttagtttgatatgtctttgcctaaggaaaagactctcctgatgtgtgctgttattctccagtccactgtgaattttgttcttgccttgtcaccctaagtataaaaccacatgtctaaaatcacattttagatagggctataaaatttacagagtgctgttatatacattatctcattttactaaactatgaactcaattgccagccagaaaagctgatcagtgaatttaagagtttgtatttagtgaaacttttgaaactttgaaatagaagtgtgagtcagatagctgatgatttaaaacactaaagcctttctcaattgttcattagaatttaccaccactcttctttgtgacctcttctctactgctctgtaagcatctctcccataagttctctctctctttttttttttttttttttttttttttttaagacagagtctcaccctgttaccatccaggctggagtacagtggcacgatctcagctcactgcaacctccagcctctcaggttcatgcagtcctcccgcctcagccttctgagtagctgggactacagacacgtgccaccatgcccggctaatttttgtatgttttgtagagatggggtttcaccatgttgcccaggcgagtctcaaactcctaggctcaagcagtccttcagccttggcctcccaaagtgctgggattataggtgtgagccaccctgcccagcccaacactaagttcccttaaggcaaagtagtatactggaacctagcatagcgcctcatacaaataagtcacatgggaattttacaattactccaaaagaatgtgttcaaaaaaaaaaaaaatcaaaaaaaatgggtgtgggtcagggctaaagtttagtccactttcctcctgtatctgccttctgctgcgaagtaactttgaaaatattaataattcaccagtgtctgattatatagaccttagagttggttcccatgaattgcctgaatctaaggcgggaaaagatcaggtatttcttcaaactctcaggcagaactccccagtctcctgagagaagaggaaaagagaaggaaaatgaggaaagggagggaaatgggtggtggtggcgatgggagctggctatgcctgtgcctccctgccagagttcctccattcctggccacgctggctcccaccctgacctgaagcctggcagtaagccctcagtgcttgggaactgtcatcgtccttttcttctccctctctctctattactattcttatttgtgttacacacaagactgggagatgtgtattggttaggggccttgagccgcagcgcgttcccggtttgggcaactgcatctgctaaagattcccttggtgtgagtttcttccccatgcctttcatcactgtttctagacaccactgatctctatttttgtgattcctacgacttttcgccagagaggcttcttccaaatatgaccttaataaagatttcccaaagatcgttttcctgctgtaaacagcctgatccagaggatcaacctgaggaagcggcgggactcgctcatcctagggggtgttattgggatctgtaccatcctgttgctgctgtatgcgttccattgatgggacatcttcagggactcttgacagccaccgctttcacaccctggtctggaataaggaaacatcggagggagaagttgactgtcttgataattagcctgaccagcaggatgaatgcaagactgacagtgatggactctgtgacatggtcaggttgagctgaagccacagtttctctgtgctgtgttttctaacacatttttctgtttttaattaaaaaaaaaaaaaaaaggttttcagttgcttttgtctccctaggaggcaggtaaaccaatcaaaaacagagttttctgtgtttccatgatagtgttgaagcctaatgacaagccaggtcttacagctgggctcttcagaaaaccaggtttctacatccaaagactgcttttcttttagctgccagattggattgtgaataaaaataattcttccctctccctctccctctccccacggtctccctctttccacggtctccctctgatgccgagccgaagctggactgtactgctgccatctcggctcactgcaacctccctgcctgattctcctgcctcagcctgccgagtgcctgcaattgcaggcgagcgccgccacgcctgactgcctcggcctcccgaggtgccgggattgcagacggagtctcgttcactcagtgctcaatggtgcccaggctggagtgcagtggcgtgatctcggctcactacaacctccacctcccagccacctgccttggcctcccaaagtgccgagattgcagcctctgcccggccgccaccccgtctggaaagtgaggagcgcctctgcccggccgccatcccatctaggaagtgaggagcgcctcttcccagccgccatcccatctaggaagtgaggagcgtctctgcccggccgcccatcgtctgagatgtggggagcgcctctgccccgccgccccgtctgggatgtgaggagctcctctgcccggccgcgaccccgtctgggaggtgaggagcgtctctgtctggccaccccgtctgagaagtgaggagacctccgcccggcagccgccctgtctgagaagtgaggagcccctccgcccggcagccaccccatctgggaagtgaggagcgtctacgcccgggcagctgccccgtccgggagggaggtgggggggtcagccccccgcccggccagccgccccgtccgggagggaggtgggggggatcagccccccgcccggccagccgccccgtccgggagggaggtggggggcgcctctgcccggccgcccctgcccggccgcccctactgggaagtgaggagcccctctgcctggccaccaccccatctgggaggtgtgcccagcagctcattgagaacgggccatgatgacaatggcggttttgtggaatagaaaaggcggaaaggtggggaaaagattgagaaattggatggttgccgtgtctgtgtagaaagaagtagacatgggagacttttcattttgttctgtactaagaaaaattcttctgccttgggatcctgttgatctatgaccttacccccaacctggtgctctctgaaacatgtgctgtgtccactcagggttaaatggattaagggtggtgcaagatgtgctttgttaaacagatgcttgaaggcagcatgctccttaagagtcatcaccactccctaatctcaagtacccagggacacaaacactgcggaaggcggcagggtcctctgcctaggaaaaccagagacctttgttcacttgttgatctgctgaccttccctccactattgtcctatgaccctgccaaatccccctctgcgagaaacacccaagaatgatcaattaaaaaaaaaataatataataataattcttgtcctcttattttacactcataatgagaaatcacaagttctttcttgatgatctgtgctatagatttctactctgtctcctcaactctgttgatatttggggaaaattctgtttttcatagattctttgagatgctgatggaccagcttcagcatgtttgaggttgtctgaaatggagatcactgtaaaactgtctttttcttttaaattacaagtacactggggttaactgtattgctggaaaaacatcaagaatgacagtcttatatttaaggcaccagtcattgtttccattttttttttaattcttcccttggattaatattttctactgaaaagaaatgaaatctcagttccactatgataaaagaaacgaatcaccagtgtctgtcagtgcccccactgctcctcctcataccagcattgacactggtagctgaggaaggggactgctcaatttctaatgtgatctattcaagaagccacatataaaaaggcattgagggctcactgtccagagaattgcttttgtaaatgctccacaacgtatgggcaaaagtttaaggactactgcctgatgtaccaggaatcctgagttctgtgaaaatctgttcattccaaatctgttaagcatttccaaacatccagagaatggtttcactgttgagggtgcatgtggcagaatctgtctctctctgcacctgtcttctgttaccatccctggacagtgacagattttaagccagccaccagaattcttttcgagttaaccatttcttagtttctgtaaattcatgacttgtcttactgaactacagcctggtttgtagacttccaacatctacactgctgctcttcaccattggaattcactgtggtatttatagtattggcttcagtccgagccacaggcaataaaaggatatcagctgtagttctcagctacatcatggtgtatagatgctgttattcaggcgaacttgctcatgggtggactaacacctggtttggtacagagactgagaagtttttcattctggtgtcaaagttttgttacattatgggtgtgaagggcatttgatatatttttcttaactatggggtttatttttctaaatgtgggttgattgactgttaattgattcagggtacccttaaaagaaaagaagttttcccattgtgaaccttaaatgatcagagaagtaagttcattgattaaattctctgttgggagaacaaaacttttctcccttgacactttattatctttgatttttcaaagggccttgattggtggttgtgtctcggttaaaatttatgggactttgctatgtagttggcatttataaaatctgaagtatcataaataaagttatttatttaattatactaccagtcttttttactggtctgattcttttgtgcattcattaaagctgattgtgtgagagtgaactgggacacaagctagtctagctcactgcagccaagcaaaccctgttgatggctgatgggcctttccattagggttttgcttatgtgaagtaatggaattatgttggttattttctttatgaaaataaaccagttcttccaaggaagttaaaaggcttggtatggatgttggtgtcagataggtctgactaacctctccgtgctgcagcctatactaaggtgacccagggccacatgtagacagctaggccagtgctttttcctcttagggtttctttgcagaaagaaacctccagcaagggaagagaggtgtgtgtccacaggaaggggctccgtggggatcccatgaagggatttgagctctttcagctccatgtcatttaacttttttgtttaaccaccttggctttctctccttttttgctgtcctccttacggaccagttaccagattcagaggctaacagttagttacttgttaatgctagtcacagccaggaggtcagaaggaattttctacttctggatccaaatgttacctcttaggggaagttatgccccctcaactattgtcttattataatgaatctttcctttttggtccttttaagtaaccactcaaaacttttcatttcactgaaaaaatatgaaaaaccatgacaatagggctgggtgcagtggctcacgcctgtaatcttagcactttgggagaccaaggcaggcggatcgtttgaggccaggagtttgagaccagcctgggcaatgtagcaagactctgtctctgcaaaaaaaattaaaagatacctgagagctcactttaatatcaaggtatttgcatccattcccaccctgttagctcttaagggaggagggaaatcaattccaaccatactttcctgtgatggaagatgtttcctcttgaaaaaatgccaatacagatttttaaaacctattgttttccaaatgcactttgtaagtttttgcttttaaaatagcttcttggaaccaattttattgtatttgtacttaatttttgttctcatctaaatgtgcattttctgactgtatagaagaagctttggtatgtaatttaataataaattagaaatctaaatgattgcatttgtaattgtttatattgaaacagtaaccatcaaggtagtttggggatagagattatggtatctctggtgttgataagtgtttctcatgatgtcctgaaacccaggatgaaataatacaggtgctgaaaagctgtcacatgtcattcagaaaccatcatatgaacagtccactagtattttagccctagaagtgaaggggaatctcttaacatgaaacttcaggaggcataatgggaatctacaattgtagaattggctgggtgcagtggctaacacctgtaatcccagcagttcgagaggccgaggcaggaggattgcttgagaccagggatttgagaccagtctgggcaacacagcaaagaccttgtctctacaaaaactaaaattagccattcatgatggtgtgcacctatagtcccagctactcggaaggctgaggtaggaggatcatgagcccaggaggtcaaggctgcagtaagcaacgattgtgccactgtactccagcctgggtgacagagaccctgtctcaaaaataaattaattttttaaaaatcgtgtactgctgggctttagtacattagttgtgcaaccagccccactgtctaattttagagctttgcaattaatccagccagtgatcaattcctcttctataaaatggtgataaggatggctaccataattgtgccctgattatattgtcagggttatgtgaggaaatgctcataagcatctcagcaaagccaggggtacagggctcacctgacataagagatatccttgggtttgtcctaatagcgagaaaccgggcctcttttgcctctttttttccctcttgctgatgtgggagaggagagaacattcaagaggtgatcagcagacatccttaattttgataaaggcagctgagcggggaaatataaggtcggttctgtgtagatagacaggtggaacccagcaatcagtttaaccagcctccaagcggttctgatgcatgccagaggtggagaaccacgctctataagtacacacattctatttagtcattccattctagaccgatagcttttatttttagtttggaactattacaaattgtgctgctctggacattctcgaacatgggttttgggacacacatgtacacttttctgttgcttatacctaggaataagattgttggattataggtgatgcacatactcagttttaagatatgttgtcagacatttttccaaagcaattgtgccaatgcccgtgcctaccagtaatgtgtgaatattccatttccttcacatcttcagcaacacttaatgatgccagtcagaatttgcatttccctgatagctaacgaggttgggcatttttacatgcttgctagctgttaggatatctttctttatgtaatatcccttcagatgtttgcatattgattaatccgactgtttttttccagttaatttttcctttgttgaataaatatgttgcaaatataccttcccattctgtgacttgtcgtttattttctttcctctttttttttttttgagacggagtctcactctatcatccaggctggagtgcagtggtgtgatctcggctcactgcaacctctgcctccctgcaacctccacctcccagattcaagcaattttcctgcttcagcctccccagtagctggggttacagtcatgtgccaccatgcccagctaatttttgtgtatttttagtagagatggggtttcaccatgttgttcaggctggtctcgaactcctccacccacctcggcctcctaaagtgttaggattacaagtgtgagccactgcacccagccatactttcttttttctttttctttttttttgagatggagtcttgctctgtcacccaggctggagtgcagtggtgtgatctcagctcactgcaacctccatctcctgggttcaagcgattctcatgcctcagcctcccaagtagctggaattacaggtgcgggccaccacacctggctaatttttgtatttttggtatttcaccacgttggtgaaataattttcatgtatttcaccatgttggtcaggctggtcccgcccacctcggctttccaaagtgctggaattacaggcatgagccaccatgcctggccttgttctcctttcttaatggtggttttgatgaagttcttaattttaatgtaattcaatttatcaatttttttcctttgtggttagtgtttttgtatcctgttaaggaatctttgcctacctccaatgccatgaagatattctcctttttttttttttctaaaagctgtattattttgcttttcaatttagaactataaatattgtgcaactaattactatgtatgatttgaggcaggggtcaagattcatttttccatatggatatgcaattgatccagcaccatttgacaaggtcatccttccttcactgcactggagcaccagctttgtcatgagtgaagcaattgtctaggtgggagtctttttctggatgtttcattcttttccattggtctgtttttctacccttgagaaaataccactctatctgaattactgtaattttacaataagtcctgatatctggtagtacaggtcctgcccatttgttctgtttcctcaaggttgtcttggctattcttggtcttttgcatttttatataaattacagaatcactttgtcagcttccaagaaaaacgtgctggattttgattggtattatactaaatatatagatcaattggaggagaatgaacatcgttacagtattgactccttcggttcatatcatgatatttccctccacttatttcaatcctgttaatgtttcagtactgctccacctgtctgccctccaggctggtgctggcctctgggatggaggagcttcaggtatacttggagaaagaaccccaggtgtctcctccaacccttcatgttctctccttgactgtggcaaggagaggtgggaagggaagagaccaaataggagtcagaggaaaggaggctgcagtaacccactgcaccttggtacagggtcctgtgctggagaaatctagagatgataaaatatgtaaggaaaaaaacacaaggctggttacaatcatactgggtagcagacaatgggatgtaaaggagaaagaggcctggacacttgggcaagaagagagcttagtatgcatggattggacaggactggtcctaaaactaccttcatcacaaaaaagctgcatgtccctggagaagactcccctcattgggcctctttcctcaccgtgaaatgagaggacttggacctgatgctctggatgcttccttcagctctgccactaggacactggtactgatggaggatgatggcaagaagctaggttgaatgtaagtgacttgccctttgccctgtccctccaggtgtagtctttgaactctaaccatccacgcactcttcctttccacagaacagatccctgtttcaggctgacttcatcccgctggatggaattccagccaatgtgatccaaagagggaagcagtaccaggctgcagccctcgtcatgctgaagatggagcctcctgggaagctgctacccatggtcatccaggtgagggccctggacctccctgcctacactgtgctctgttcattttaacctctgctcccagggacccagcctcctgccttttggctcccaaagctacccccactcagcaggtccagtccttgtgttcagccacccagtgactgcttgctgtcttgtccttcctcacctggaactaccttctgagagtcataacggcatctcttggttctcatcctgaggctactcaacctctttgtgacctttgaatctattgaacattccctctttcttaaacatgttttctccttttggttttaatgatttttttttcactcctattgttcacacagtgagtggacagggattgtcagttatctcatacatccagcttctccttctcattccactatcctgactcagaccctcatgacatttctcccaaagcactgttagccttacttggcttccttctaccattctctcctgcacttaacctatcattgtattcacagggcaccacagatagtgagaggcagggtggaggggtcttcattcttcatactacctggaaggcaataatcttacattagccatatgttccccccggaacactcagcatagcatcatccatatggggagaggtgaataaatgcttaattcttcctccttctggcttcaccctcccagcttcagctctcccaccccaatactgttcctgccctcaaatcctttgcttgcctggctcctggctaaatcctggatctgaaactccgattccaactgcacaagctccgatactatttgctgaacactcatctcgtagctgaagtcattgctattgtcaccataatgtgcctcccacgtttgcgccctgtcttcaaggtacaagctccaccactctccgtgtcccaaagcaacaacccaacagctgcctagttttaaagaaatctgaggcacctgggacaacatgtaaacagagctgcttgaaatttcacaaacatccatatgatattacagcagagaatcttcatggcaatttgtaaatggaggcgagaggagatggataattgagccagggccttcagccttgtgattgtacttttaatgtctaaattaatttaatgtaagctaattatagactcacaggcagttgttagaaatactaaagagatcccatctatcccattaagtcaagtcacttagcatttatccagtacatactgtagggtggttctctgaaattctctagtagtgggtcttgagtagagtaggaatacaaatatattaagcaaaagtgttgcatctgcattgggagatttatcatttatcatgaaagacaggcagtacatatgagaaaaaaacaaaacagtatctgtgatatggtttggatgttttccctccacttctcatgttgaagtgtaatccccagtgttggacgcagggcctggtggaaggtgtttgggtcatggcttcatgctgtcctcctgataatgagtgagttctcactctgaattcacacgagatctggttgtttaaaagagatcttgctcttgctcttgctctcctgctccctctctccatgtgacgtgcctgctctgctcccccttcaccctccaccatgattgaaagcttcctgaagcctcactagaagctaagcgatgccaacatgcttcctgtacagtctgcagaaccatgagccacttaaacctcttttcttagtaaattttcccgtctcagataatccctcatagcaatgcaaaacagactaccacaatctagaaacagagtttgagatgaagagaaatagctgtaatcactatagtatctatggagaatgttccaccacaagtggggagtctttaggtagaagaccaaagggcaaggcgagcagcccagcgggtttctcatacctgactaaggagagaggtagataaagacattagcatggcagtgacaggaggatggaagagaaaaatcaaatacgtggtgatgggggaagagtagctgcagcatgcctgtgtccaagatggaatggagatgtaagcttcctcaacacctaggagcctacggggggcatgttgtacttccctagaaatactaacattttacaaaacagtgagtctactatctattgcgaggcagaaagcagcaaagtaaaacttgtgcttgcttaaacatgttttcaaaatctttatgacattttatatatagaaaaagggagcaaaatgatataagcttatgaaccagagcagtggtcagaaacagtaaagtcaggagaaggaggcagtttcggggacaaagatgaggtgttctgttttagatgcatggagttcgaagagttggcaagatatgcaagtgagcgcctggcaggcaggacagctggattgtgtttctgctgctggtcaccacctccacccccaaatctggctattactagttgtggtccctctgggtctgagagaacatagataaggtaggcattaatatactttatggaatcttagacttgattgcgttcatgctgcctttgcctcaccacctggtgcccaggttgaataggttaagcccactctcacatctcagaatcccccttcactagttcagccctctgttcactcatctccctcgcataaccacttcctcctatggcaaacagctgagttgttgtcaagacacagaggagggctaagcccacaaatatcataaaagtgacctgtgcaggctctggactcagactgttggagtctgagtcctcagtacttaacaggtgtgtgtttcagggtcctcatctctgaatggagataacagaatttccattgtgaggttgttaagggattaaacgacaggacaggcagtgtgactcaggataaataggagcgataggtgagtctttcctattactatgtagcaatatgttattattgttagttgtttatccttgggtatgttgttattattttttattcttttttttaccttcagccaactcactccatgttgttgttattagttgcttatcctgggtatctacccacttcatctggactttgggttttctatgacattcaccatctttccatggagttttccaggttcaagccaacgtgagctgctttgatatctttgcctcaagagtattctttgggccggtcccgtgtgtccggcattaaagaccttagatagataccaatggcataaatcctgcatatgaaccagttgaaaatgaaaacaaaatagttctttttttgtttttttagagacagggtattgctctgtcacgtaggctggagtgcagtggcacaatcacagctcactgcagcttcagcttcctgggctcaagagatcctcctgcctcagtctcctgagtagcttagtctagacatacaccactacacctgtgtacctggctaatttttaactttaattagggacagaggcttgctgtgttgcctaggctggtctcgaacttctggcctcaagtgatcctctgccctggcctcccaaagaactgggattataggtgtgagccaccatgtttggccccaaataggttaagaataaaaaaatgaatgcgagaatcagggaccccttttttaagagtcaaagaaaagcaggaaagaggaaacctaatagtatctaactgggggccagggaagatttgatgagaatagcttggctttgctccatgaattctgactgaagccaccgtactcaacaccacttcaatataaacaataagagtaagatgatcagagattggaggaacagctttgaaaataagcagaggctagtttaagctataaggatgtgaatgatggaggaggtatataaaaaatcaaacgttaaggggctgattcttaaagggcagctgtactcaaggtggaaataatagaggtaatgataacagctgctatttgaggacttgtgtacccaaggcactgtgctaaaaatgctctctgtacatcacggacataaacataacgacagtgcctgaaataagagacctggttatcacctcccactgacagataaggagattgacactgggagagtttattatatcgccaagtatcgaaattagaggtgaacatggactcaaatccaggtcagtctgactctggggcattacgcacaaggaagtcggagagcgcgagcgtgagtgtcagggcagcagcagaccagtctgtcaaggcagcagcggggaggaaagcatcgagaggagaaggctccatgctgtgtaatgggccctcccaggaacgagccaagcatggtctccacccaccacccctccaatctcctcgccagctcctgatctcccatatctactacatcatggaaatcaacatctggacctgatcccaacacatctcagatggtggaatatttgctagggtaagaagggaatggggcatgaggccacctaatcatccaacaatctctgtcctgccagcttcaagatctcccaggccaacctgtgtgaacgtcctgaagcttaagcccctgagccctatcccttttatagccatgactttaaatatgaaaaccccacctctgaaccccctttatagcatgtcctcattctccagctgtgctcccatccctcaagacctgtcatctctcttgtcccaggcagtgagcacaggtggagggggccatgtgcagttgctccattgggcagcggctcagctgacctgctgctccctctgttgtcctgatgacctggctgcctgtggcctgctgggactcccacgtgctgtccatacccatgatgctttaggccctgggagattattacccagtaggatgtcctgaaggcacgtcttgtgaggtctatccagatatactgaaagcattgggcagatgtcacagaaagaggaggagaggtcagaggccgggcctcctgctctccgaggctcagcgccttctcccctgggcaggtgtgtggagatcgtccacctcttccaccaaagggatgacacggtgagggtggaccctgagctgcaggcctgggatcaggagatcatggaggtggggctgtgccaggcccaggaccgaggtaagatctgtcccagagataggagctcctgggagactctgccagggacccttcccagtgctgcccttctggggacaggaccccaccctctcctcacacctcccttcctccacacaggagagcatctgcatcccattcccacctccccagactcaggacacttctagagacctgaggactgtcctcctcggagaccctggccatcaaccctacccccaccccaccccagtcacagatgcccctgagctgccatatcctggggcccaaccaggccagagccacagctgtgagggggtctgccggtccctgctggggctcatgttctcacttcacgtttgtctgctttttacctaaggatgcaaacagggagattttcccttccaaagctcagagtgacctaccttggctttccctcccttcccctcctgcctgctactgtccagcacacacgaagggcacagacctgctgcaccctcgcagcagtgcaaggccagctctagaggccatctcaatactgtatatgctttggctccaacctgaactcaatgccctgacgcttgggtcagtcccttccctaggatctagctgctaccttttgtccccgcccactgcatttttatttatggagaagacatagcctttcttgggcccttcccaggttcattttcctctctctcgcacacatgggccagccaggattgtttcaggtcatccttcagcttctctcccttcatccttcagagcaacaccttgagtcccaccctttgcctgtgtgggaaaacgcaaacacccactggccaggccccggggacgcccatatcaataaattaacccctgccttaaaggggagtcttgccctggaggacctggggctacaccaccttacccatcccaccccaccctttgggcccttcaagaaccaaactttctccatatattttttttttaattgatcattcttgggtgtttctcgcagagggggatttggcagggtcataggacaatagcggagggaaggtcagcagataaacaagtgaacaagggtctctgattttcctaggcagaggaccctgcggccttccgcagtgtttgtgtccctgggtacttgagattagggagtggtgatgactcttaaggagcatgctgccttcaagcatctgtttaacaaagcacatcttgcaccgcccttaatccatttaaccctgagtggacacagcacatgtttcggagagcaccgggttgggggtaaggtcatagatcaacaggatcccaaggcagaagaacttttcttagtacagaacaaaatggagtctcctatgtccacttctttctacacagacacagcaacaatctgatttctctatcttttccccacatttcccccttttctattcgacaaaaccgccatcgtcatcatggcccgttctcaatgagctgctgggtacacctcccagacggggtggtggccgggcagaggggctcctcacttcccagaaggggcggccgggcagaggcaccccccacctccctcccggacggggcggctggccgggcgggggctgccccccccacctccctcccggagattttttttaattttattatttttatttatttttgggatgaggtcttgctctgttgcccaggctagagtgcagtggtgtgatcttggctcactgcaacctccacctcctgggttcaagcgattcttctgcctcagccttaccttgaccaggctggtcttgaactcctgacctcgtgatccacccgccttggcctcccaaagtgctgggattacaggtgtgtgccaccacgcccagccactttctcgagttttctaggttctttcttttaggcaacccatgccccaaaagaccattatttttctccttggctctcttctccccatgaaatagccacattagagattgtacaatacatatttacacataaactttaacctctcattccccatttctcttgcgccatattcaatactctttttacctcaccattctgtcatcacctgaggaaaaggcaatgtgctaattttctttaaatttaacttttatttttaagttcaggggtacctgtgcaggtttgttatataggtaaacttttgtcacaggggtttgttatatagatgattttgtcacccaggtattaagcctagtacccattagttatttttcctgatcctctccctcctcccatcctccactttcccataggccccagtgtctgttgttcccctctatgtgtccatgtgttcttgtcatttagctcccactttaagtatttgttttgttcccacgttagtttgctaaggatagtggcctccagctccattcatgttcctgcaaaggacatgatcttgttcttttttatggctgcatagtagtccatggtgtatctgtaccacattctctttattcagcctaccattgataggcatttaggatgattccatgtctttgctattgtgaatagagctgcagtgaacataggcatgcatgtgtctttatgatggaataatttatattcctttaggtatatacccagcaatggggttgctgggtcaaatggcatttcttttgttaggtctttgaggaattgctgcactgtcttccacagtggttgaactgatttacactcccaccaatggtgtataagctttctttttttctccacaaccttgccaccgtctgttattttttgactttttaatagtagccattctgactggtgtgagatggtatctcattgtagtttcgatttgcatttctctaatgatcattgatgttgagctttttttcatatgattgttggctgcatgtattgtcttattttgaaaagtgtctgtttgtgtcctttgcccactttttaatggggttgctttttgcttataaatttaagtttcttgtagacgccagacattagatctttgtcagatacatagtttgcaaaaattttctcccattctgtaggttgtctcttcactctattaatagtttcttttgctgtgcagaggctctttagtttaattagatcctgtttgtcaatttttgcttttgttgcaattgcttcggtgtcttcatcatgaaatctttgcccattcctatgcccagaatggtattgcctaggttgtcttccagcattgttatagttcggggttttacgtttaagtctttaattcgtcttgagtaaatttttgtgtatggtgtaaggaatagatctagtttcaatcttctgcatatggctagccagttatcccagcaccagccaagtggttttttcatccccgctatgttcaattcaaatttatttaaccatggaacaattattttatttttatttttattttaccgtaatattttaccaaacaaatactgtcaattgaaaggagcatttaacagagcatgcatgtcagatttatttgaggaaatttgaaaacaaatacgtatatacgtctctcagcttccattgatgggagtagaagaaggaagtaaatgatatcaaagacacttagaaattatccggtaaaccagcaattccaatgaaatctacgtaacagtaatggcacagtcctgacacatgaatcacaaacttgcatgggacttcaaatggtagcacttaggtgatgatcctttaaatgaacaatagctacctaattttattatattttactcagatttctttcctttgtgtctatcatctagaaaatacaaaccaatataagccactacaatatacatatgattaataaggtagaccttccagtctataatggcaaggatcagtgttttgaatagtaaagagcaaagtggctaatatttctcacttatcacttgaaggggcttggttcatgcgggttctacaggactcatctttctctacattgttcattttcaactaggaatgagtgtcacttactgagatttaaaatttttcttttaaggactaggatggtcctctttttggctaagtgaccttgagcaagctatttaatctctgagttctggtttccttatctctaaaatggatgtattgcatgcccccccccaccacacacacacacattcagatttttgagaccaaataaataatgaacgtgacattgttgaagtgtgggtagtacagttggcataagatgattgttatcatatgccccactctacaaaaactacctccccaatacgcatgtggagtaggagagcccaggccctgccacatgatggaagtcattaaattctctgatgcccatctcacatgtaaattgagtggaatggaatagttgatttccagtttccttactgtctttgacatgagtctaggacctctctatttctctacattataatccagatacctaaaaccactgcctaaaacctcctgggaataggagggcatgcttcggtattcttaactactttgggtgtcagagacagatttcactgaaataaaacaaacttacagaaaagttgtataaatcctaagtgtacaacttgatatgtttttcctaaggttacaaacctatatgattagcactcatatcaatcaacacagtactagcagctttcccagaagctccttgtattttctcctagtcttttgatccaaaggtaaccactgtcctgatttctaacagcgtaggttactttttaatttgacataaatgcaaataaaaacactcactcacctgtgcttggtttcattctctaagcaataggtttaagatttacccacattgttgcagatagttcttcattttcattttgtgaagtatcccattatataagtatggcacaatttattatttttttctgctattgatggacatttaggttgtttccagttggaggctaacaacgtcagtgcagctatgaacatggttgtatgtgcatttctgttgggtatatacttagaagtggaattggtagatcataggttatgtgcatatacacttttagtagttactgacaagtttcctgaagtagttccagcaatttccactttttccagaagaatatgagttacagttgcttcacatcctctcaaatacttggtgttttcttttcttttcttttcttttttgagatggagactcaccctgtcacccaggctggagtgcagtggcatgatctcagctcactgcaacctccatcttccaggttcaagcagttctcctgcctcagcctcctgagtagctgggattacaggcgcctgccaccacacccagctaattgttttgtatttttagtagagatggggtttcactgtgttggccaggctggtttcaaattcctgacctcaagtgatccacccatctgggcctcccaaagtgctaggattaaaggggtaagccaccgcgcccagccatacttggcattttctgtcgttttcactttagctgttgtggtgaatatgctgcattatcatgttgtgagttgaactcacattctctcaatgaccagtggatctgagcaccttttcctaggctgagtagccacatggacatcttcttttgtgcagagccctttaaaatcgttttgcccattttccttttgtctcctattattccctcattttaaactgttttttaacagggaacatttgaccaccacacagcctctcagatttcctcatccttcaaaatctaccataataatcatagctataaggtactgaggggctttatatcatcatctgatgtataaggtaattaatattatccccactttcagaggcaaatgttgaggctcagacagagtgagcaacaggtccaaggggatgcagctgggcagcagcagggccaggactgtacccagagctgatgccacagcctgtgctccgaccacagcactccctgctttgcagatgattgtcattgaggcttgctcccttaacgaaattaccagcgatcatctctgactgttcatatctccttttgctgctttatttctattcttatccctaacatactatgcgtaactttaatttttaatgattctatatatgctctttcttctctattagaatctaaattctgagagggcggggatttttgttacttttgtatacccacgtattcccaatgcctagagagtgcctggtacatagcagttgtatactttttgaataaatgaataaacactcattaattctaaggcttgggtgtcccaggacatgaggatttatttttatatcccctctggggctgcagactgtaaacttggctcattcttctcctaggtttccctgtctccttccagtctcgagctcagctctgccgtttcctcgccatgtgaatcttcacatgcaccccccaccatgcagccatcaaccagggccagccgtggataaacaaaagcctgcatctgtcagggcaggtgtctggactgggggttcttgaaagagacagccgggggctagtgtccacacatcaaggttcagggtgaattcaggttcctcttctagcttgactggtatgcctggatccctaatggcccgtgctcagtgaggatgccctcacccaccaccaaacaagatgcgacaaggcccacagtgatgaggtcactccctgatgtctggcaatcctatgttcaaataagcatcatgtggcttctgagctggcggcaggtggacgtggtgagaggggacctctgagactacagaggagatatcagggtgcggggatggattccgggtccctgtgtcttggaactaggagctcattcatcctcttttctgccccaggtacccccttgagcatcagaaagtatatgtctcaggccctgagcccaaagctgtgctgagacaatttcaaacagatctggacaacctggaaagggaaattgtggcccgaaatgagaaactagaccttccctatgactatctgaagcccagctacatagagaacatatcactatctgagatcaaatattctggtcctcaaagaccttaggccatcattactatgaacattttcctcctgaatcttgtcttttcttagctctcagttgctgtgtttttctttcctcctctgatttttctacctgagtatctcattagcctgaggcactgtacttaccttcagggaccctatgagaacgatctgcacattgcaatcacattccttagagaaatcacccatatactcctgtagctttcccttggccctggaaatttacctactccattcatcatagaatgtttaggagtgattatctatatggcacgctatagaggtgcaatttcatttctttctatctggataatcagttatgccagcacagttcatagaaaaactcattctttcccactaatctgcaatgctgacattaatcaaattcctgtatacaaatgttactactggaactgtccgttctgctacattcatcagtttttccttccctgcatcacagtgatgtaagtactatgggtttatacctaacacagcctactatttgataagacatactcatccaatttgttctttccaggtgctctggcttttcttaaacatataaatattacaattattttgttaagtttcagaaataacggatgatgtgattttgattggaatcacattgtatgtatagaaattttaatacaaaatttttgcattacaaaaatgtcaacttcagccaagtttgcatttttgagatatatccaagtgggtccttttatgtattgtgattccatttgttttttgtttgtttgtttgtttgcctgtattgcatctgggttcctgggtaagattggcctatgaagggttatagacttgtagagaggcaatatcaggaactctgctaaaatgagttcattaaaataatagtgaagaacaaaatacagaattctgtcactagagactcaaatgcatttgctgaaatcatgtacagttgggcctccacatccctggattcaacctatcatggatggaaaagattttttaaaataatggttgcatctgtactgaacacataagaccattttttcttgtcattggtccctaacagtgcagtttaacaattcctggcatgccttgttttattgtgctgtgatctcttgtgctttccagatattaaaaacacagtttgcaaattgatagtgtggcaaccctgcctcgaggaagttcttcaatgccattttttccaacagcatgtgctctgtgcctctgagtcacattttggatatttttacaatgtttcagacattttcgttgtagttctatctgttatggtgatctgtgattgatgacctttgatgttacagttgtcactgctttggagctccatgaactgtgcccatctaagatggcaaacttcattgataaatgttgtgtgtctgattgctcctccaaccagccattcccccatctctcctattttccttggccctctctcttccctgagacacaacaatattgaaatctggtcacttaataaccttgcagtggccactcagtgttcaagtgaaaggaagagttgcacatacctcactttaaatcaaaagctagaaatgactaaggatagtgaggaaggcatgtctatagccgagataggccaaaagttgggccccttgtaccaggtcgctaagttgtgaatgtaaaggaaaagctcttgaaggaaattacaaatgctaccctagtgaacccataaatgacaaaaaagtgaaacaaccttattgctaataatggaggatgtttgagtggacgtttgagtgttctagatagaagattaaccaatccacaacacttccttaagccaaagcctaatccagagcaagaccctaactctattcaattctatgaagacggagagaggtgaggaagcttcagaagaaaagtctaaagctagcagaggttggttcatggggtttaaggaaagaagctgtctccataacgtaaaagtgcaaggtgaagcagcaagtgctgccgcagaagctgctgcaacttatccagaagatctagctaggatcactgatgaaggtggcgctacactaagcaagagatttttatgtaaaccaaacagccttctactgggagaagctgccatctaggattcccacagctggataggagaagtcaaggcctggcttcagagcttcaaagaacaagctgaccctcgtttcaggagtgcacgcagctggtgactacagttggaatctggtgctcacttaccattccaaaactaccagggcccttaggaatgaagctgaatctactctgcctgtgctgtttgagtgcaacaacaaagcctggatgacagcacttctgttaacagcatggtttgcagaatagtttaaactcactgttgggacccactgcttggaaaatgtagatatacctttcaaaatatcctgctcattgataatccacctggttacgcaagaagtctgataaaggtacacaaggaggctgatactgccatagatagtgatttctctgatggatctgagcaaagtaaattgaaatcttctggaaagaagacaacattctagatggcattcatatcattcaggattggtaggaagaggtcaaaatatcaacattaacagtagtttggaagaagttgattccagctctcatggatgacaagggattcaagacatcagtggaagaagcaactgcagatgtgaggaaatagcaagagaactagaattagaggtggagcctgaagatgtgactgtattgctgcaatctcatgagaaaactggaacttatgaggagttgcctcttacagataagcaaagaaagtggtttcttgagatagaaactagttgtggtgaagacgctgtgaacgctatccaaatgataaccatagatttagaatattacatgaacttagttgataaagcagtggcagggtttgggaggattgactccacttttgaaagatgttctactgtaggaaaaatgctatcaaatagcttcacatgctacagggaaatctttcttcaagggaagagtcaatggatgcagcagacttcattgttgttttaagaaattgccacagcacacacccaccttcagcagtcatcattctgacccgtcaacagccataaacattgaggcaagtccctctaccaacaaaaagatgacaactcgctgaaaaaatttttagtgtttttagcaatattgttttaaattccagcttttatttaagatataggggggtacgggtgtaggattgttacatgggtatgttggatccgggtagtgagcctagtacccagtagatagtttttcatcctgtaccctcccccttccaatagtctgcactgtccaattttcccatgtatttgaccacatgtgctcagtgtttagctcccactctcccacttgagaacatgtggtatttagtattacgttcttgtcttaattcacttaggattacggcctccagctgcatccatgttgctgcaaaggacatgacttcattcttttctgtggtggtgtagtattccatagtatacgtgccacatttttcttatctactcaatcattgacagacacctaggttggttccatgtcttccctatagtgaatagtttggcgatgaacatatgagtgcatgcatctttttggaataatgatctatattcctttggttatatacccagtaatagtacttctgggtgaaatgttagctctgttttaagttctttgagaaaactccaaactgctttccacagtggctgaactaatttacattcccaccaacagtgtgtaagcattgcctttgctccatggtttcaccagtgcctgttgttttttggctttttaatagtagccattctgtctagtgtgaaatgggatctcatgtggttttgatttgcatttgtctaatgattagtgatgatgggcattttttcatatgcttgttgtccacttgtatgtcttctttagagaagtgtcttttcatgtcttttgcccattttgtagtggggttatttggggtttttattgcttgctgatttgttcaagttttttatagatttggatattaggcctttgttgggtgcctagcttgtgaatattttctcccatggtgtaggctgtctgtttactctgttgatggtttcttttgctgtgcagaaactctttattataaagtgtataaaatttataatcaataaatgtacatttgccgattcaataagtcaatcacatttattgatttacaacataatttacttaggtcccacttgtcactttttatttttgttgcaattgcttttggagacgtagccaaaaattctttggcaaggctgatgtagagaaggatatttcctaggttttcttctaggatttttatagtttgaggtcttatatttaaatccatggtaggatagcacctccctgtccctttgaagtgaaccatgttacctgctgtgagcagtgaagtggagcagaagtcacaggtgccatttctgggcagaagctttgaagggaccatggtgagccaccccatcatttcttctgcctaagcagttttgggggcacagaagtcgggtgttatgggctgaattgtgtcccccacccccaagttgatacgttgaagtcctaaccccaagtgcctcagaatgggattgtgtttggagatgggacctttaaaggtgtaattaaggggaaacgaggtcatatgggtgagccctcatccaatctgtctggtgtccttataaggagaggagatgaggacacagacacagaccgaagaccacatggagacacagacaagagggtggccacttataagccaaggagccaggccttagaagaaaccgattctgctgataccttagtcttggacttctgggaccccgaactgtgagaaacaatatttctgttatttaagacctccatctgtggtatattcttaccgtagccctagcaaactcgtattgatttttgataccaggaagtggaatgctgctctaaaaaatacgcaaaaatgtgcaagtggataatgagtagaggctggaagagtttggaggtgcatgctgcaaaggcctagatggtcttttttatatgtttaatttctggtcaaaaatattttagttgttttatagagttctgggaaaataattacctaaggaaaagaaatagcattgcttataggcgggtttgaatattagccctgtagctttgctgagaaattgagaaattcttcttggttagagtcctgaattacattaaatggagggatagggttaaggtgtttattttgtgttttttgctttcagcttggtgtttttggttgttgttgttgccccaagtgagtccaaaacccaaccgggaaaagaacattaaatcttaaaacttgagaaccttctttgactccatggcccatgttccagatatactaggatgtggttgggcggcccagggcttcaggtggctcttcccccatggctttgctgggtgcagcccaggcagcagctctcacatgttggagtttgatgcctgaggctctcccagggtggacttgcacactgctggctctaccatcctggaatcttggggatagcctcttccccacggctctgctgggcattgccctagtgggaacgttctgtggtgtccctgcccctgtggcagttttctgcctgaccccaaggctgtctgggacatactttgaaatgcaggtggaggcagccatatcccacagctattgcactctgcacacctgcagaatgagcaccacgtggatgctccaaagagttttctgcctgtgtcctctggaggggtgatagcatgtcccccactccaccagggcccattgagcaacacttggagcagccaaggagcaccacagcacagtgtgggaaccagcgacttcagggagtgctgggcagcaagccccaaggtcctcaggggtcctcagggcgccccagggcctttcttggaaaccgtactgccgtcagtgccctggcaccatgggcctgtgacgagagtgcggcctgagtgatccacacaatgccttcagggtcgctcttccattgtcctggtgaggagcacagccctgatccacgcaggcctcctgacccacaccctcgtgttcgctcccaaacacactttcttatctgttcaaaacgggcaggctgagaaggctaaaagtttcccaaatctttaagttctgcttcccttttgattataagttctgtctctaaatcattcctctttttctttcattttcctataaacgttcaagacaatcaagccgctccttcaatactttgctgagatatttcttctgccaaatttcagttacatcactcacaagttctgccttccaccaaacactagtgctttgccactttatggcaagcgtcactcacctttcctccagtttccatttacctcttcttgatttccatctgagacttcatcagaatgacctttcctttccatattcttttttttttgtttgttttttagagactgggagccaccgacatgccaggagacaggcctggaacagaaccttcctgcacagcctcagaagaaacccaccctgctgacactttgatcttggactcatggcctccagtactgtgagacagtaagattctgttgttgaaggtgcccagtctgtggtactgtaaaacagccctaggaaactaacatagcctattagcctacagggtgaagagatggaattcgcaatggacctccaggcttactgtctacagctcccaaagtgtgctgtcggacccttgggtgtgtgtaggtatgcaagataattttgggtggtgcagagtgaataatgtcaacttacataatggatttatcttactggataaatcacgggttccctcctgtttggaaccaggctgcacagcaggaggtgagcagccagccagtgagcaaagcttcatctgtagaaacagccgctccccatcccttgcattaccacatgagctgtgtctcctgtcagatgagtggtgccattagattctcataggagcatgaaccctactgtgaactgcgcatgccagggatctaggttgtgtgctccttatgaaatctaatgcctgatgatctgtcactgtctcccatcacccccagatgggaccatctagttgcaggaaaacaagctcagtgttcctacttattctacattatggtgaatggtataattatttcattatatattacagtgaaataataatagaaataaagtgcacaataaatgtaatgggcttgaatcatctccgcatcatcctttccccttctcccgggtccgtggaaaagtcttccatgaaactggtctctgggaccaaaaaggttggggaccaccggtataaatgcttctaagaatagttaagcaaattaaggtttacatgctgctaaaaatatgggtttcaatgctaagaaaaatggatgcacgtgaaaacactctcttgctgtggtccagggaatctaaaccattctaacagagaaacgtgcagcttggagctggagctgccctccgacatcctgtccacctcatatccctgcaccacacacgcatgcacacatgcaagcagacatgtacacatgcatacgtgcatgcacatgaacgcacacacacgcacacatgcacataaatacacgtgcatatacctgcacacacacacactcacacacacacacacactctcactgtgcttcatgccctaaggtggcctgggagggaatgcgtgtttttaaggggaatgaagatgactcaggcccctcgttctcctggcgtttgcaccagtgtcttctctgcagaccatgcttcagtctctttcttggctctctctcttagtgaaagcaagaagcagagcccctgcgtgtacctggctgcttagggtgcaagccaagttcacaagcttcccggggagcctggtgagaagaaggcactgcagagcctccccaaaagaggcgtcaacttttggtggatccttgagcctgggaaaatgatagacgggacatcacagttcatcagaagacacaaacaaaatccactcaggaagagcagcagtcaaaggttttattctctcggagaaggttctcgggggctgtaagcagcaggcagaagactttattgcatgtgtggttaggtgatggcaacctccagttttcactgggaactgggatcaagagtgacccgacctcctccgcagcccctagggatgagtcagctgcctcttctgcatgctgacaaaccttggctctcatttatgccccaccgcaagccagccacacccctgcctcaccagcataaccacctcctcctgactttagccctgacagcactgcttcctggtaaccttccccctcccaccatggtccaggcaagcctaaatgccagcgccctccacccacccttcctgggtgccactctactgtctgcttacccagatgtcttaacctggctttaccaagatggaacagacaacagggatgagcccccagcctctcccaggaaggtttggcaaaatgctctccatttagaagcaggggcagtgacgcggcctagggatgaccccaggcttgtcacccaagcagtaagaagggcaaggagcccagtttcatgcccttaccctgggaggatgtggccagggctccacaagtccctcgggggtagggggagtgcacaggagagcagatccaccctccttttgaggaagtagccaccactcccaggaagcagcagatggggtgcactggcagagaccctgcgtgctgtagagcagggccagcagatttgcactcagcctcagccccaggggagctgcaagacagactgagaccctcacaggtttggctctgtgtccccactcaaatctcatctggaattgtaatcctcctgtgtcaagggaggaacctggtgggaggggattggatttggggacagtttcctcccgtgctgctcccctgatagtgagtgaattctcaggaaagctgatggttttaaagtgtggcacttccttgttctccacttactccctcctgccaccttgtgaagaagatgcctgcttccccttcaccttccgccatgattgtaagtttcctgaactgcgagtcagttaagcctctttcctttataaattatccagtctcaggtatttctttatagcaatgtgaaaacaaactaacacagaccccttccctgaagtgccttctccttaggccaccagctgcccccatgctcctcctctgccccctggtctttcttttcccctcatgaggcccaagtgatccacaaggccagcttcacctccatcctactgcaggcctgtgcagctgctggagaggccgggctcctttcctcaccccagagtgtatacgctgcaggcaggcatgttgacgcctcaggcagtggatactgactctgggccctgctgacccgggcaaggccccattgtgatgcgtgccatgacctcagaatgtcactggtgcttagcacctgctgctccccggcttgcctctgtgttctacagcagctacacacagacagtggtatctgtgagtggctctgtggactcaaaggttttctccctgagaggcatgacccaggccagctgattcttcagaatcaggtgagtgtgacctgctctcttccctgcaggctgacttggggacagtggctacggggtgggcgatgttggcctctgggcacctgctgaggagggtcatccctgagcactcaccgggtgcccgttctacactgcccgtgtagacaattgtctctttcgtcctcatggtgcctccatagggtaggtgctgttcccaaatgtacccatttgacaactgagacgtctggggtcagagaagtggtaatcaacccgggaatcccgacatgaccctgggttttgctctcagccctgccctgtgctgggctggacttaaggcctgaaccctgtggtctccctgccctagatcccaaatctgtcgagggtttccgatcccgatggggcagagcctggccctggcagagccactgggatggatccactgtgggtggggtggaggggagggtcctaagaacacatctgtgtcctaagctgggtcctgatggtccctgtgggaccaactgaacacacatggtcccttgtccgggagtggcatggggagccttctgcctttgggcagctgtggaaaatgaaggagccctggagagctggctggagggaggctatcttccatcctgttcaacggggtccaggaactggggttgtccccaggtatttctttgtctggtcctatccaggccttgccctccttttgctccaagtgttcccaggagggacgatccatctaggtgttccccaggaccaaagacccactgttcttcctccgtgacccaggaaaatgaagccccctcctgtatggatagctcagaatggtggagtccacagtccctccccgagagatgtggtttctatgagtacagaggctgcgttggacacagtagcttattttcattccttaaacctgttgttcctaaagtggcttcactggtgagactgaagggccatggtagcccaagtgatgagcagagtagaaccgagcactcaggagagaccttgttccccgtaggaaactgagcatctctgtggtcccgagcatcccagagacctctggtccctgtccccagtctgcctccatatccctggaatagcccatcatgggcccttcacccttggcaggtggacaccattgaaactgccggggcaggtgtatgcccatttcatggcatttggggacaatgggactctctgtccaggtcccactgtcctcaagtccttgggaagatgcacacccctgctggagactccagagacccatgcaggtgtgggccactgggtctagccccttttcacctgagggcggtggtggaatggggggttacgcagccaggcagcatctgggagccgggcaggagcagttcaggtgttctccgaagctctcaggtacagtgtaacctttagatgtttttgtctcacaggatggacctgatagaggacgcggatactttggaggagtgagaggacatcactatgaagtatgagaaggtacagatccatctactccttggagggaggcctcttccagtgcaccctggtcaaatggtcctgggctccctaggagcacagtgcagggtggccactacccccaggccctttcagcctttaccttggacccctcaccaaggctccctctgggttacagggacactgagctgcactgccagaggacatggggcctgtgcctgttggaatctacggaaacattgatcgctttgggattctgcagtgagtcctctgtgctcctctcagcccctaaatcacctgtctcagctcatggatgggtttgcttttagaaaggcctttctgacgcaggacatgtctccccaggttgagccaacctcctttccagggtcagaactcctccctggctcccctgcaggtccagcctgaggttgttgttaggccagaggtgtggggcccatctagggagtgggtgggaatggagagggggctaggtcaggcccctgggctctcagcagttctgtcggcaagtgagcacaaaaggagcggggcagcctgagggtctggccctgtctaccaggagacaaccccagtgagatccaagggttgtggccacagggtgaggagacacctggcccagcctcagggatgttgtccagcaggtctctgggggcccaactgcccctgttctcccccacttccctagagctacagccctcactgtccccatggggaagggggaaaggcatgaggaccataggggctgtggccttaggggaatgggggagaagatgggcagggccaagttctgggcatctcacaaagaggccagggaggcagcagagcttgcagctaatgaccctgggtctggtgctgggaagggatctggggccaggtaagaggagcctagggccaggtgtagtcgctcacgcctgtaatcccagcactttgggagtccgaggcaggcagatcacaaggtcaggagatcgagagcatcctggctaacatggtgaaaccctgtctttactaaaaatacaaaaaattagctgggtgtggtggcgcatgcctgtaatcccagctactcaggaggatgaggcaggggaatgacatgaaccctggaggcggagcttgcagtgagccaagatcacgccacagcactccagcctggatgacagagggagacaccgtcacaaaaaaaaaaaaaaaaaaaaaaaaaggagcccagcctggagcccatccctcagggatcataggatggagagacggaggacctcgggggaggtagggtgggaggaagcttatgagccatgccacttctgaaatgcaaggcgtgtggctcaggtgcagggagaggcaggtggatgctgggaggtcataccctgcgagggccttgggaatgtcgggtgggatgggcccctggcgcaccctgggtgcactgggcaggtctcagggcaggctccctagaccctggcgggtccacatcatgtggtcactccctgagggactcctgtcagggcccggtcacccaccctgggcagcccccatcccatctcagggctgacctttctcagctccagcagaaagcaccacctcgagtccaggatgggcagccccattgtgcagcctgaccacccccgacaccaggggccccagtaaccttggccacgctggctctgcactccctcttctcccaggtcctgacccctcctgggagtcagccccacaggaaggcctttgtcctcctttccctgtgccttctcctgggctgagacctgagctggatgggacagagccagtcctttctggaggtcgactccctgacccggatggctccaggccctgtgcaggtcctcagctctgcctgggttgccttacagtgagaagaggctgccccctgtcagctcccgggaggcagaggtaagagcctggtccagggacggggggacgtggcgggttgttgatgagcagaggaggcagtgggcctgggcggtggccagtgaggataacacgctgtcactgggaggggtagcaatccctgctggacctgacctcaggttgctgtatctctggcagtttgatgaaattccaaagtgagaaccacagtcctggcttggggatggctgcccacttgtgttaggaccccacctagaggctgggctctgacctacgactggtgtgtctgtggcctgaggatggcacgtcccagggtcccaaggccagcccactggtgctcattcgctcaaaggctctcagcccttagggtctgcccttccctggctttttctagctgggtcccaccagggctccagagcccaagacccagcatccagggacggctccgggaagcctggtagctccgctaactccaacattcctcatttgacagcaaatgcagcaggagatgagacgcaagagcaagtggatggcaatgctgggaaaatgggagacatatcagaacagcaaaaaggtcatgtgtggagggagaggcccccagaatcactttctgcagaaacagggcacaggcacccatggctatgacctggcagcgtaagcctctcagagggcaggtggcacactgtcctcacctagaggaccgcaggcctggttgccagctttgctgcctgttcatgcaagcgtcaccttgctgagagagaatctatatctagggctggggccaccgggagctcagggctagggaagcctcctggtgacctgaaggaaggaaaaggtccagatcagagttcagactttgagtgtccatcccctctttcagtcctgggaagggagaccctgtcccagcttgacatcacctctcctgacgaatcatggggccaaaatcaaagatttccagaatcctcgggctctggttctcgctggggttgtcgcggggcctgtgacaccagatcgttttctgcccacagctgatgaagcgagtgtataagggcattcccatgaacgtccgggccgaggtgtggtcagtcctcctgaacattcaggaaatcaaggcgaaaaaccccagacaataccgggtatgctcagccacagcacaacaaacaggccaggccgtgtcagcggcccaggtctccagctggagggaacgtcaagccccgctttggagggtgggtgggatggtcagatgcacatcctgagcacggacagtgacacaggcaccacaggtgagctcggctctggtgaccctccctggcttccgaaacaagccaaaaagcagctttctgcagaaagaaaccttccttctttccttccttcccgaagtgctgactgtgggctgactgccatttggggcagggagtcttccatctgttctgaggctgtttcctcctcttggccctgccctacaggtcatgaaggagaagggcaagaggtcatctgagcacatccaccagatcgacctggctgtgagccagacactaaggaaccacatgttcttcagggatcgatatggaaccaagtaagcctatgggagccacagggtcccagcggagatggggtgaatgagagggatggggatttccccggagcagaagccagggtcacccaggagggatgacagagctgccaagagctctcctggtccagggagcaggcggcaccatggactgagcacctcccaggttccaagccctgggccagactggaacatggggggccagaacccaagaggatcctgaggagacagacggcagcaaacaaaatcatgcacaatggtgaaaggtgctctccctgacccatggggacccatggtaggaccctcgggagggtggcaggttggagggcccgtaagcctccccaggcaacactgatagtaccaaaagctggggagattcagggacctggaaactgtcatccaggtctgctgggaacgtgacatggcacagccactttggcagccagttgggcagtggctcacaaagttcaatggacttgaaccacgcgtccccaaagtgtcacagatattgaacccactgatttgaaaactgacgtccacatgaaacctgcaggccaggttcactgcttgattcctcgtcactcacacacggagccttcggggatggccttcaacacgggaatggggagaacaaggctggtcctcccttcaaacggaagacccagtgagaaaagggaacgagccagtgatgcccgcatgaacgtgggtggatcctaggtgcattttgctaagggaaagaagccagacccaataagctaccaaagtaggattcccattcttaggccattgtggaaaaggccaaaccatagggactgagaagcagtctgggtggccaggggctgacggatcggggagaggctgggtgcataggggccaccctggagacttggaggatgaaggagtcgctccaggaggggctggagtggtagccgggagactctgcacattggtttagaaccatggaggacctgtacacccaaagactgaattggcgtgtgtgcaaactgaaaaaaaaaagatcattcagagtgaaaaggatcaggcaagtcactgtacaactgggctatttgcatgtcacagatgtggattttactgaaacatttcttcaacagtcaaagtccctgaagagctcactgcttatctggtgaatcatctgaacctgaaatgggatttgttgttagggtttgtagacaaagtgaaactaacagcatctgcacaacacaaaccaaagccccctttctctgtttcccaggcagcaggaactattctacatcctcctggcatattcgaagtataacccagtgagtattcctggcagtgaggttcccaggccgtatttccatattcacaggagtgggtgtctggtgggagtgtcgttgcttcttttaaagttagtatttgtgacccaccaggatataggaggtaggattccagctcaccgctggcataaacctccagcaagggggtggtctcaaggggtcaagctgagacacagaggagtcagggcctggactcctggtgtcacctgggcctgaccaccacttatcggaacaagcccctcctcctggggctgccccaaagcccgggagcttggcagcatcacacacagaatggtgctatcaggagacattttggacaaggtgctgaagtgcccgatggatatggctcttgtcatgaaatgaatttgcatcctgaggaagtctcttcttcagaggaagccttcccagtcacctctgccctctccgatgacatgagtcctcccaggtgacctcagccctcccaagtgacttacttccacggtgactctggctgttgcaggtggtgggctactgcagggacctgagccacatcgctgccttgttcctcctttatctgcctgaggaggacacattctgggcactggtgcagctgctggccagtgagaggcactcctgcagggtaggtgaacagctgcccctggggcttcacgcagccagacccggggatggccaccctggccaggtgatctcggctttcagccaaggcaccttccttgtgtcgccagcttgttgggagcctttaggacgtctctgctgacggtcccaaaggaacccggaactgaccccccagagcccaagtcagacgcctttcatccccatcagcagaaggcatctcatcctccccgtggctgccctctgtgtcctggagccacgccctccggctctgattctgtgcagctggctctccgcaacctgagagtcctcctgcccttcagttgctcaggctccagctgcccttggtacccacgaaagggtaccaagcccagatggcagcatctccccatcccgtgtcccttggcccagccccacttccaggagacgaccacaaagcccagcacccaccctgttctggccgccccctgtcgtggcctcaaagtcaggcttgccctcccggcaccctggcccaggaggcctccaggggcacctccagccaggctccaggggatgttcccacccctcctccccagggccaaggccacatggtggggtcaccagatgggagggtgggaggcctcggggtctggggggctctgcagctgcccagctcttccagctgatggctccacatcttgggggaaggctctgatttcatgacgggctgggggcttctcaggattccacagcccaaatggcgggacagttcaggggctccaagaccatcaggagcatgtggtacccacatcacaacccaagaccatggggcatctggtgagtttatggtcccctcggctcttccccagaggccctgcatcctggggggctggaggaacagcgggggctgcagcccctcatggggctggtgacaggctgagtcccagccagggcctgacctgggatgtcgggttccccatgggctgggagttgggtttcctttccagccctggaggagacagaggcacagggatgggggccctgctcccacagagaagggctaagggcagtgtgtccaccgggagtgccggaaggggaagatgttgcggggagcctgggacactgcccagtgttctgcactcggggaagggtcttcagagggccctggaagagggaggtttttagggcagcccatggggccctgagcacctctgttcctcccatcaggacaaggaaggtctatgcacacagggttcctcattcagctggcttctccgggtgctgaatgatggggtaaggaggcacagggagaccctggctcagggaccctccttgccctgcagtgccctgcttccccagccagggggtccagctcaccccagtccacaggaggctcaggcagatccccaaaggacacacaagcaagaccctctgcccaagagggctcatcccagtgcagaggacagggctcaggaccagcctcatggacagactgggccaggacccaactagggagggctcaggggagcctcaagccctgggcaagcccctctctgcactgaaatgagtgcccccccataaggagctgcaagaccttgtctgacccagcctcctggaggggtcgggtgaccctcatggggaaggtcagtgaagccccaatgggctagctcgagccaccagccccagcctggaagggccaggtcctcccatgcctactttccccacagatctctctcgggctcaccccgtgcctgtgggatatgtatttgctggaaggggaacagatgttgatgctgataacaagcattgcctttaaggttcaaaggagtaagtccacgtgtgcccagtggggcctggggagcactggggtcagaccccgactagcctaagggcagcttcctcacactgtcctcatgatcctgttctggccaagggggaggtctggccaggtgggctgggcagggcacagtgacaccgagcccatccctcacatgacccagatgaaagtcaggagtgtggtgagcacttccctgcccaggcccccccaaccagccacagccttctgtgcacatctggacccctggggtggccacaaaaggatctggcactgcccagtgggagactgaagtggtcacagggtgtgggctctgacccttcccagggaactctcctggcctgatgcccaccttgtccctagagcgccacatgaagatgtccaggtctggcctgtgggcacgttttcaaaaccagttcttccatacctgggccctggatgatgacactgttctttttttttttttttttttaatacttgaagttctagggtacatgtgcacaacgtgcaggtttgttacatatgtatacatgtgccatgttggtgtgctgcacccattaactcgtcatttacattaggtatatctcctaatgctatccctcccccctccccccaccccatgacaggccctggtgtgtgatgttccccttcctgtgtccaagtgttctcattgttcaattcccacctatgagtgagaacaggcagtgtttgctttttggtccttgcaatagtttgctgagaatgatggtttccagcttcagccatgtccctacaaaggacatgaactcatccttttttatggctgtatatgtgccacatttttatggctgtatatgtgccacattttcttaatccagtatatcattgatggacatttgggttggttccaagactttgctattgtgaatagtgccacaataaacatatgtgtgcatgtgtctttatagcagcgtgatttataatcctttgggtatatacccagtaatgggatgtctgggtcaaatggtatttctagttctagatccttgaagaatcgccacactgtcttccacaatggttgaactagtttacagtcccaccaacagtgtaaaagtgttcctatttctccacatcctctccagcacctgttgtttcctgactttttaatgatcgccatcctaactggtgtgagatggtatctcattgtggttttgatttgcatttctctgatgggcagtgatgatgagcatattttcatgtgtcttttggctgcataaatgtcttcttttgagaagtgtccatatccttcacccacttgttgatggggttgtttttttcttgtaaatttgtttgagttctttgtagattctggatattagccctttgtcagatgagtagattgcaaaaattttctcccattctgtaggttgcctgttcactctgatggtagtttattttgctgtgcagaagctctttaatttaatgagatcctatttgtcaattttggcttttgttgccattgcttttggtgttttagacatgaagtccttgcccatgcctatgtcctgaatggtaatgcctaggttttcttctagggtttttatggttttaggtctaacatgtaagtctttaatccatcttgaattaatttttgtataaggtgtaaggaaggggtccagtttcagctttctacatatggctagccagttttcccagcaccattttttaaatagggaatcctttccccatttcttgtttttgtcaagtttgtcaaagatcagatggttgtagatgtgtggtattatttctgagggctccgttctgttccattggtctatatctctgttttggtaccagtaccatgctgtttttgttactatagccttgcagtacagtttgaagtcaggtagcatgatgcttccagctttgttcttttggcttaggattgtcttggcaatgcgggcccttttttggttccatatgaactttaaagtagttttttccaattctgtgaagaaagtcattggtagcttgatggggatggcatcgaatctataaattaccttgggcagtatggccatttccacaatattgtttcttcctatcaatgagcatggaatgttcttccatttgtcagtggatgacactgttcttaatcatcttcaggcctctatgaagaaactaacaaggaaacatggggacctgccacccccaggtgggctccagtaccaggtcccttcctgagtcaccttctggggcagtcaatactaggggagtgcccaggaaccccatccctactacctgggtcttcctcttcagcttctcttcttcctcttcctcctggactctaagaaagtacaggaggcccaccattcctcagggcaggcgctcagtgcgtgtgtactggacgtgctgtgcatgcaggagggggatgtgggcaagaccctccaacaagccccctcccacttcccacggtagcctgttctccccctcacagggccctcaagggcactggaagagccagacccatttgtgagagcctccactcctccctgcaagcgctgacagcctcagagagcagcagaggcccctcactcctgcagactcctccaagggtgccaggacaacaagccttgagccggggagacaagggaatcagtgtctcattatctctaccatctctaccatctcggagagggagatgtggcaggataatagggtaatagtggggtgagggtcagcaggaaaacatgaacaaatgtctctgtgtcataaacaaggttaaggaaaaggtgctgtgctttgatgtgcacatatataaacatctcggtgcattaaagagcagtattgcctccagcatgtctcacctccagccctaaggcagttttctcctatctcagtagatggaatatacaatcgggttttacaccgaaacattccattgcccagggacaagcaggagacagatgccttcctcttatctcaactgcaaagaggcattccttcctcttttactaatcctcctcagcacagaccctttacgggtgttgggctgggggacggtcaggtctctcccttcccatgaggccatatttcagactatcacttgggggagaaaccttggacaattcctggcttttctaggcagaggtccttgtggccttccacagtgttttgtgtccctgggtacttgagattagggagtggtgatgacttttaagaagcatgctgccttcaagcatttgctcaacaaagcacatgctgcatagccctaaatccattaaaccttgagtgaacacagcacatgtttctgtgagcacagggttaggggtagggttacagattaacagcatctcaaggcagaagaatttttcttagtacagaacaaaatggagtctcttacgtctacttctttctacatagacacagtaatagtctgatctctctttttttccccaccgccaccgccaccccaaagaggggcaaaggggaccccggaatcttggacaaaaacctcagtgttcaggtgtcagggtgggcctggagttccggtccaaccacagacccatcaccctcagaactgaaaatggtcttcaaggtcaccaaaggctatcaataccccaaccggagagggcaaaagccttatccaggttaagcagcacaaaagtgagagagcagagactcgagccagctctaactcccaagccaggattcacaccaactctcgaagtggagtctctgagaactcttcactctctgcccccatcgtgtgtgcgtgcacacacacccctttctcattggctcactgccccccgccaagttccccattccaggagatgtctgggcgggattatacacaagcccagcactgcagaactgaggatatgcatgggctgagaagctgcaggaagttgctgaccaacgcaccaaactgctcagccaacaccacagatcacgcacctgctgtgtgcacagctctcgggggctgggggtgaagagggagatgatgacacagcctcagaccttataagaacttatcatttgaccctggagggaaaactaatgctggaaaatacagaacctggctagaaagcctggggtgctgggcttgcctgccacgcccacatcacaggaggcagctggggtaggcattaccccgctgagcctcagcgggggctgccctcagggggctgccctcctggccttgatccctgaaagggtcctagcagagagaggcaccagcagggcctcagaggatctgagttgacagaggaggaggaggcatttcctctgcaccagtgatgcacacctgccccaaggtggccaagatccaggaccaataagcctggcgagcacagagaagcccggtgggcatcctccaggcagaggattcctccctgcaccctgcctccttcctccctccttcatcctgcccatgtcaagcatgaggcatgagatcatggcatacctgaggcagctgggaaacaccattggccaatgccacatcttggcttgcagtgactctccaaccagacagatcatcagagtcccaaagaagattcgcagccctgctccaactcccgcatcagcaccgctcaggataagcctgctggtggggctgttttacaagctccccagccaactcaggctgggaaggcaagaggcagcttaggggggctgaggaggggggcagagaagctgaggggagagagggggcttctgcagggcccccagctccgggtggacaagccagagccacaggcttcagggcaggaggaaggaaaagtagagccccactgagccaggacaaagcagcctggaatcggggcaagcaggggcaaaaccttgggcaggacattcagcctctctgagcctcagtttccttctctgggaaatgggaataacagccctgcctcacaggcaaattaggggattagaggccaaataaataaagcacctggcaaaggctggtggctagcgttatgtttatgagcaggtgtttataaagcacctactatgtgcctggcattgtgctgggcactcagactcaaagaagacagagaagccctggagacatagtcttctgaggggagaagctggtaaagacaatcccaatacactagtatcaggccacgatggggtactggggtcctgcagagaaacagagggagcagagtccctgggggagaacgaatgtccaggcccaggctctgcccctgtgacagctcccgggatctggggaaatctgtgagtgccaggccaccttcgggggtcctctcacctcctgcatgtttgatacccccttctgaaggtggggctgtcatagcccttcacaatccaaccacagatcttcagcttctgccttgatgacggggtgaaacattctgtgcggtgggcagggtgggtgtggacgaactgtgagtccctccatgagtcccatagctggctccccagtccagcccaggcacatgtcctcagcagcctgggcccacttggggtgcctattctgcacaaacaaggggcccagactcctgtgtgagtctcgggaaacccccaagaggggctcccattgcccccaccccaggaatgtgagcaggaagctggtgcctccagggaaggctgtcaaccccaggggggtgtgggagaaagagtgggcctctctcagggatgtttcttcaaatggtcactacagctcagggtgaggacgggactctgtcaagctcagttatcccctcggctctgtgcatggggggagacctgcctggctctgctccctctgttcccctcatttccccaaaacctgggttgccacaagagacccacactgcataagggctgagggactgttgtcactccttcaggtccccatggggcaggcactgtctcacggagtcaggactgctgtctcctccttcccctggactcagtacaaaccagacacagagcgatgtcatgccatagatgagtgtcccccaccacatccgtctccctacaagacatgctgccaggtcaacccctgcaaggggggtctggaggcagctaccactggcatgggcctggcctgagagtcctatgtgtgtgtccatcacatgagaccaggtgtggcagctccatagggcaaccacatatccgcagcttctgccttgatgacaggagttgaaacattctgtgcagtgggcagggagtgtgtggacgaactgtgagtccctccttgagtcccatagctgggtccccaatccagcccaggcacacgtccccagcatcctgggcccacttggggtccttggacaaagtcactcaagtctccccaccacccctggcaaccactgcctctggcacctcgacatcacactgcacacacatccctcctgtccctgccaccgcctccctccatcccatccctctgccggtggccctgtgtgagtcttgcctccccagatgggttatttgattctgacccagtgtgtcctgccagggaggagccatgtagactccatgaaatccgtctccatttctctgcagtctccaggacatagatttgctcccatctcccccatcagactgggatcaccaagacaaaaaccaggcccctatctcctccattagactacaaaccctggggctaggatcatgtcttctccatcagactggaatttggaggacaaggaccatgtccctatctcccatcaggctagagtccccagagacaggactgcttttgctcatccgaaagctgtcaagaacaaagatcatgagaccatgttcctgtcttcccatcagatgacaatctccagagctgggacctgtctccatcagactaggatctccaaggtaaggaccagttccctggcccacccccatcagaccagacagcgtctctctcatttgatcttttcctgagtatcaatcctcagtgctaatgggtcacttctcccacccctgctgagggacagccatcacctcctggagctcctgaggaccctgccccagcaatgtgcaggtgggctgcctgtcccatgcacccaatccccagggcctcagccacgaagatgcttatgttctttcttgtactgagtcaggctgaaagaaaaaaaataaaaacagagaggaaattagatgtgagtctgagagccccacccctgccaagaggtccgcagccctgaccccaggctccctcactcactgggcatcctcgccctctagcaggcggtggtaggtggcgatctcctgctccagccgcgtcttcacgtccagcaggatcttgtactgctggttctgctgctccgtctcgcagcgaagctgggccagctgctcctccacactgccgatcagcccctggatctgggacagctgcatgcagtagcggctctctgtctccgccaggttgccctccagggatgctttctgtaggacggcaggaagaccaggggtcagtgagggttgtcagtgtcctcttcggggcccacccccatgcacagggctgttcctaccatgctgagctgggactgcagctcgatctccaaggcctgcatggtgcgccagagctccgaaatcttgctcttgccgctctggaccagttcgctgttggtagccacctcgcgtttcagttcctctgtctgcagacaggacacaggacagggtggtgtgagcctggatccctctcccaagtcaggcctcctcccaaatctaactatggagagagtggtgccttctcaccagcttcccacatcccaaagcccagaaatttgaaatgttagctttctatggttaatccctgcgtgtgggaggcacagaccggaaacttgagaaccagccagaacatgtagcctggctcttgctgctagttcctgacttcttgagagagaggtggcgactcccaaggtctttaccctctgcctttattctgtgggggctccctacctccccacccaccccccagatcccagcttgagctcagctccaggtctgttgatgcagcgtgtgaccctgtggtccacgcagcttgctgaggagtgggcacctccaagacacctggctgtggccttactgtcagtgctaaggcccctgagccccagccccgaagagagacctctggcctgcagcagcccccaccttgctgaagaaccaatccttggcatccttgcggttcttctctgccatcttctcgtactactcatgcatctcgttcaggatgcggctcaggtccatgcctggggcagcgtccatctccacattgatctcaccgcccacctggcctcgcagggcgtttatctcctatggaaaaaggggatgtggatgtacgcatctggacccatcctgacctctcactcccaagccttcccctacgaggggaccccactccccacaaggacccctcctttgttctccctctgctctgtctgaccctctaaatgatttttattcatctgctcagtattgcctccaccatcagactctatctcccccattagaccaagggctctccaaaataaaatctaattattaggcctatgccccaaacatttcccctctaatttccaagcttctatgtagatgttcagctttgagagtttgaaatgggacaagaaggagacttctttacttatcccccgccctcatgagggaggccagggcaggtagagggagcctctgcgggcccctgggaggttccttgggtactgagaagcagtgtggtacaaagaggagtctgccctgcacgctagaccccaaggatcagggctctgcagacagggaagccctctaaggtgactaatcccagtgcgcctgctctgctctgctctctcccatggcctcagccatggcccggccccagggctctgccacccactcctcagcatctttgaccttctgccccagccacctcacctcctcgtggttcttcttcaggtaggccagctcctccttgaggttctcaatctgcatctccaggtcggctctggccaaggtcagcccatccagcaccctgcgcaggccattgatggcggcctccacactcaggcgcagggcctgctctgtctcaaacctgccgtgggaatcagggacttcagcccaggctgctcggacctgcaggtccaggtcctggctgctcccctgccttcattttgccaggactctaaggggttggaagggctgatgagagggtcgagtggaaatgaattccagccccggggccccgggaccatcacagggccagatcccacgcccaccagcttccttacttctctctgcctcccgcctcccctccctctcttctattccctgcctgagcccagcaaccttcagaactggctgccttcactgcatcctggactaaggggtggggctcctgggactgccccaccctgagctcctgggccttgccacaagcaaccaaggagtcctggggtcaggaggggtaggtaccctgagatcctcccccagctggcccaggctgcccaagcccacagctaggactcacttggtgcagaagtcagcagcagccagatgggcattgtcaatctgtagcaggatgttggcattgttcaaggtggctgtgaggatctgaggagatgggagagttgtcaggtcactggatgggggtggctgagcccacaccagggttctgaacagatcttcctgcctgggggcctctcttcctgcccagcacctcccctgccacccagcccctcccttgccccgtgctgtattattggcagaggaggggcaagcaggagtctgaagggctgaaaggtgcctcttcttcccctgctactcagtaccccaccagaccccgatgccaggctcagccttaaaggagaagagacagctagctggctgggagtatgaggcaaccagaaaagaaagggaaaatgtccccagggcagaagctgtcccagaattctagaacaagggaggggatgtgggcaaccccttcgctttacagtcatctagggggtacccctgacaggctcccccaaaaggaggctaaaggagccctcaccaaagagtggttccaaatcacaagtcaggacccctcctaatccctaaccctgggcgccagccagcagccccgccccctgcggttttaagggacagcaggaggaaaggagaagccagaaaaatccccaaataaggcacatcagaggccttccccaccctgaggtcctgccccctcctttctgcctccccccgcagcaggtgctattgggagctcactcagacacccccactccacatctcccaaaaccccctcctgctgacccctgctccaaaggagcaagacaccatgcatccagcggcccacgggcccagccctccatctgcatcctcccgcctcatcctacaacctctccaggtggaagagctccaccagggagaaactgaggctccaaggggctccacgaggcctgtttgttcctgactcagcctgctgcccccagaaaaggggcatgtgggccacacaggggccccaaggcaggtttccagaacctaagccacagccaaaccacccttggctccctgagaccctatggctggactccatgcctttggccagggcaggagttggggggaagaagtcatgccccccggagacccctcccaccagcagaccctaccttgttctgcagctcctcgattgtcctgtagtactggctgtagtcacgggcgggccccggggcctgcctctggtaccagtcacggatcttcacctccagctcagtgttggcctcctccagggcgcgcatcttgtccaggtaggaggccaggcggtcattgaggttctgcatggtggccttctcacctccggccagcagcccatcaacgcccccaaagctgctgccatagccaccgccagagccaaagcagtagcagctggaatagctgctaccccggagggcactgcccaggccaccagcagatcccagcctgcaggagccggcacccaggccgccagacagccggcaggaggtgcgggatgagccactcccaggccggaggagcccttgatggagctggaggaggtgaactggtggatggtggtggtcatggtggcggcggcaggaggcaggcacacaggagaagggctggggaggagaggggccccaagttgtgtagggctgtgggggttcacacgcttccctgggctttcatcaccatgggccacctgctagctcccaggtggctggggaccccctccccacccatcatcaggaatttgcctcatttctccaaatcctcatgctgggtgccgtgcgtgtgcatgtgcgtgccactgctctcaggcctgtcacctgtgattcgggcgggccctccagctatgctttcccatgacccaatacagagaagaggagaaggcaggacttcaccgtccccaggccttcccaggcagccaccaccccagcccagcctgcctcaaccctgtctggtggggaaatgggttgcagtgtcaggtgacccccttgaagttgctgtctttcacccaacactgctccacctatggtgctggcccggggctgggtgctgaagagaaagaggggaccaagagcctatcctgccttggaaactgagcccaaacccaccaggcccacctcacagcacagaaatgccatcaagccttggagaccaacccacatcgcacataaagaaactggggctccagaggggtgcagtgtccacactggccccttctgcagagcctgacacccaggaatgcactctaggggctacagttccatccagtcagcttctgtccctgccccatccctagaagcccttgctaacccagtctcctcgtgtaaacctttccccaggtttacactccaggctggggtgggcaaagaggggctcagctataggatggggaaatggtgggctgtgctaagagaggatctaaaccaaggatgcccccttccactcctctcacccttctgtaccccaagagacctcagggtcaggtgaggggcatttatctcaggtctcagcccacaggaaacctaaaggacattgcccaagaagaagctcttacagagaccccagccagtcccctccccactccaggctccccaagatgtggctcctcaggtgggccatgtgccccaccccacagccccatcctgccctgcccaccaccccaaggccggccctgggtcccagggtcccaccaggcccgctgggtggaaggtggtcatgtttcagactgccgatggcttccacttcccagacaggcccagatagccccaccagcagccgagagagattcctcaacagcccagtggctgccaagccaccaaagcaaacaggacaccccccatgcatacacgcacagcggccaccccgcctcacacacaccctgagctgggcagagccggtctggtttcccaggctgcctgcgtcgctctcaccccctctcactcatcaatgccctggaccactccttcagaagcccctccccacggagcccctctccttctgctcttgaacctgccctgggctgaggcagggagtgctccccaaaaggcatggtgacggggactcggggctgattcttagaaacttttcccaatacaaggggctgtcccatccctccacccttaatcctttcgcctcctcccttcacgtctttccaggagcccccggcctggatggagtgggcagaatagattggcaggtgacaagctgatacccaaacactcaataaactatccacctcccccagtccctcagcccacactgccccaaaccaatgaacagaccagatcacacgaggcattgaacttggagcaaagctttaatagcaggcactggacaaacccaggaggcctcctcagtgaggggctgcagaaagtagatacagaaagacaacaggtcatgaaccggggcccagatggacactcggggcatggcagtagcatgctggcagctggagctgatggctgtgccatggcccttgaggtggggctgtcacaggcagaaaggggcctcagtggggggagaggtggacctgctcacagaaggagaccacctctccaacctggacttcctccgtgatggcacacctggtggctggtcactgtggctgcaggcgatggaggagggaggcacagggaacgtcaggcaggagctcttccccctacctgcccccgagtctgtggtccccccagtctcccacacagaagggccctcagcctctcccctcccttggggtccacacagcaggagagggcaacttcttaccttcccgggtgggctgcgaggccagggacaaggaatactgagtggccagcctgcagggagaggagcacccatcagcccagggatgccagccagcccaggctcctgcaagcgctgctggcatgaagcaggacctggcagaggaggttcccccaaattggtgaaaaatcacagttgggaatgcacagaaattagcacaggcccaagaatgaaagggcaggggttcagcgcagcaggaagaagaaaaagaaacagcacagcagtaggcctggaggcactcaccaggaatttacaaggagaagctgagcaagtggtttttccatatcccagagggcccaacaaatagacccaattaaagcaggagagactgtcgttagactatagatggacttcaccattttcggggagcaaaaagctgcaacgtgtgactaagcatggagactccaggaaactgtcagctgaaggcctgatcacccttcccacctgcaaacccgaccaccacccaccttgctcttcaccctgtggctgatggtatcaccactcacacagtcgtcggaaccagaaacccagggccatcaatgcccactccttcatatgtgttcacccgacacttactgagtcctgactgtgagccacgcttaccctgagatccaggcatccagtcctgctgttttgagctataacctctcttctgcgtgcaccaccttccttcccctgctgccccaccccccctccaccccgcaggacttctctggccagactccctactccagccccctgacgcatctctctggccccaccctgacccctctgatccatttctccctctgcagccagagtgaatgttctaaaatatcttgatgttcattcccctcttcagctccaaatccctccatggctccccattgcctacgtgatctagtccagacgctttaacttggcattcaaggctcctcagtcagactccagcctgcatggtcagtttcacctcctgcaaacccccacaggttcccacattcacacctcctgaacttcgctggtgctcagacaccaacttctccctgggtgaagcgggtccccaggccgccccagcaggtacccgggtgcacactcactgggcgtcctcaacccccagcaagcggcggtaggtgtcaattagttcaacttctatggaaaaagtagggaggtatctcaaagaactaaaagtacaactacctttcgacccagcaatcccactactgggtatctacccaaagggaaagaaatcattatataaaaaggcactgcactcccatgtttatcgcagcataacttacaacagcaaggtcatggaaccaaggtaagtatccaccagcggttcattaaataaagaaaatgtggtacatatacaccacaaagtactaggcagtcataaaaaagaacaaaatcaagtcctttgcagcaacacagatgcagctgaaggtcattatcctaagcgaattaatgcagaaacagccaaatattgcatgttctcatgtattaagtgagaacaatgggtacacatggacatgaagatggagagaatacactctggggactcaaaatttgggggggaaagttgaaaacgtacctactgggtacaacctccaatatttgggtgatgggtatgctagaagctcaacccccccattgtgcatgtgatatacatataacaaacaagcacgtgtaccttctgaatctaaaataaaatagaaaaagaaaaaagccaaagaaaaacatcccggtaatccagggagcagcggctactgcctccactgctcactgcagcccgcaggttccacgccggcagctcctgcctgcggggcagtggagctgcggagaatggtgggatgggtctaggtgccagggccagagcccaggaggggcactgagtaggggcctggccggcctctcccttgcaccggagcaggggtgcctggtgaaacggacaatctgatgctctctgggccctgcccatgttccccttccatccaccctcctttgcatctttctgtgcctggggtccccataggaagcggtcacatccagactcaccaggcctgagatgctggaggatggagaagcgcttgccacgggaaaaatcctccaggaacacatgaacaaaacttcgcctgcacctgggacatccttctctacggctggcctatgaggcaagtgttctgcacacgctccttggctaactccaatgcagaggagcacatgagcccaacctccacggcaggtgcagatctttgcctcccttttataatgtctgtattcaaatgacataccctggaagcctctttctgataggatgagagcagactctgtactacaacacagattggataagtctccaactctgattagttaagattatccagtcagagcaggagactattatccaataagagttgtcgaaaaaagttccttctcacccaatcaaaacaaagcttccaagatacagcggttgagtacagccgttataaaagggaggcgaaggcccattccgccattttctctttgtggaggctgggttcgcgtgctcttctgagctgtggtcgtcatggaccggaagcgtgtgcggcgcgcctgccttgaggccagcatcagggaagggtgtcccaggtgcaggcgaagcttccttcaggtgctcctggaggacttttggctcgcaagcgcttctccattctcccaacgtctcgggcctggtgagtctggatgtgagcgcatcccacggggcccaaggcacagagagagggaggaacggggtggagggagggaagcgtgtgcaggggccaggagcgccaggctgctcgggcttcccggcccccgcagcccgccaggagctgtggccccgctcgtgccaaggcagaggcctgccctcctgctgctggcgctgtcacctccccgtgctcctgcctcctgagtccctgagggcctcctgtcatctggaactggaaatgttagtgaagtgacgttttgtgaatatttattggcctttgcgtctttgtcttcattttcagtgctggcttttctgttgggtcatttgtattcttacgttgatttgaagaatttaaaaaggtattctataaattaatcctttatggggtcatttgtagtgcagatagttgtttcttagtctggtcattgtaccttaattatatttcacatttctttcttgctggtaaataagaagctaattgattttatagattgattttgtatcgtgttacctggcttaattcacatattcatagccatcatttttggattgtggtgggtttttcatgtacttatgtacatgtagttatgtacttacgtacttacgtacttaaatacttacgtacttagtgtcagccacgcgtgtgtctccatccttgtgcctgaagcctgtatcttctctccagtatcaccatcccgtaatgactgaagcccacgtctgcccttgtgtattgtcacctggtctgtcctctgcctgcactttatgccccctgtcagaagtctccatttcttggtcctgcagcccgtgccagccgtgtgagtctccatcctgtgtgcttgcagcacattgcttgccttgaatgttgccatctccttagccttcaggcagtagcagtcctccagtgcctcaatccctgtgtttgcagcccattctgatgtttttgtccgtctgtcccctgagcttctgcccatgccagcttatgtttgctacattctctgtccccctaatccgtgtccacagtcagtgttttcatccatgctttttgggccatgtctgcactcgtgtgtctccttcccctgtgccttcagcccatttctgtcctttttctggatcatttctcccgggagactatgcccaaaactcctatccccagtgtttgtacgtgcagccagtctatttcgttgagtatctccgtctgttgttactgcagcagaggcgtgtcattgagtgtgcctgcttcccatgcctgtcttcctgtgtctccagcccttgtccatgcagcccacattaggactcttgtgactccacccttcagcctacagccacatctaccttcgggtatctttatctctgtgccccctgcccacgccaaccttcacctactcctctatcctgcacctttacccgtgtctgtccctggtgtgcctctctgccatgcagctgtagccagcgagctccctttttgtctggatcccctgtgattgtagcccaggtcttctctcctgtgcctgcagcccgtgtctgcccttgaatgtccccatcctctgtgcttgtcacccactggccaggcctagcatgtttccactctgtgcctacacccatgtctgcctccagggtctccactcatggtgccacagtttggttcccggtccctatcctcctggggtggattctggcattgtgttgggagggagaaggtgacccatgaaagcgaagcctggaatgatgtaatgggcaaggaggctgccattcagcaggctgcacagtggcagagaagacatggccagtcagaatcctccctgcatcggggcactcacgtggggctgtgcctggtgtggggagtaaggggaagctggagtaggaggtctggagccacctggccctcttgggcctgagaccctccccactgcaggggctccatcacttccctggtggtcctgcctcctgggatcctgccctgcagtgtttctgcagggatcctctcacctggaacttgcagtggcgggtttcatgtgaggtagagtttagcaaatgtttattggcgtctgggccttacttttcttcatatgctttgctcattttgtgcgtgtttttgtagggtcctttttttatatttatttgaaggatttatcttaaatctgcaaattgatcctttattggctcatttttgtcatagatacttgttctctagtttgatcattattttctattggtttcatactagtatatagtaatctggttgataacaataatgtatccagtaagttattaattgaaacagttttggggtttccaaggattgtctaggcatgtaatagtgtcatatacacataatgacaattttttttgtttaaaaattaatcctaatgcctttttatttcctactgtattgtttctccactacaatgctgattaaagagtgatagcaggcatcctcgtctgttcttgcactgggggaaaaagcttcccataattctctgttagttatgttatttgttattggctagtattagactttatcagatttcatcaaattaaggaagttgcttttttttttttgagatggagtcttgctcttgttgcccaggctggagtccaatggctcgctctcagctcactgcaacctccacctcctaggttcaagcgattctcctgcctcagcttcccgagtagctggcagggaaaacccagctgcagcctagacctagcccagatagtaaattagcagggctgggagtctctgtcatatcagcagtcatatgtcttaaaaccagaatctacccagattatatatatatatcttgtatctgccgctgccattaccttcttttcactttatgtcaaaaaaaggaaaagaatcccagcactgaggcaggaggattgcttgagcccaggagtttaagtctgcagtgagctgtgatagcaccactccactccagcctgggtgacagagggagaccctgtctgaaaaaaagaaaagaaaagaaaacctgtcatgttactgaccagtaataggggctcccaaagtataaactcgcctcagacccctgtttgttcttcctgctaccctgtccattctgcctctgcccggttccgaggctggaccataccatgaaggaaggccccttggttacagcctccccagcccgtcagccatgctgccaagaacactggaaagagtgaaaagctagagggaggtggctgcctgcaggaggtttagcataaaggaaataggaatggtaacaggaaattgaagaaaacagttaaaaagagcagtcattcaagaaggactccactgatgctgtgctgtcccccacctgacagaaatggactgaggcagctgccagagtggatatgcaaaggcaattcacatgttcattagtgcccttttataatgtaacctagtcataatgagattgcagggaagagatggaaaataagatgtttccaagcttgatcataagaatagtatttcctgctggcgtgattgtgtgtgtgtgaatattttggattagttttcaaaacattttacatttgatgagacccaaaactcattttgccttgagtaatttttattcattgttaaatctgtgtaaaattagaaatataaatatgtgtctgctttatttactcttcacaaaatatggtgtctagacctgtttgtctatgatgcctcataggcttgttctctcagaattaggaagccaaaaaaaagtggtgaaagtcagatggttcatagtctttttgaaaaccagtagccatgtgcattttacttaaaataacttttctttttacctcaccaaagtacagcatgataggttatgttcaatccctctctctctccgtgtgtgtgtacatatatatgtattttacttgagattgagggggtacatgtgcaggtttgttacattggtatattgtgtgatgccgaggtttggggtacagttgatcccatcactcaagtagtgagcatactatacaatggttagcgtttcaggccttgtccccgaccctgcctcacccctttcagagtccccattgtctgttgttcccatctttgtgtctctgtgtactctatgtttagctcccatttataagtgagaacatacagtattgggttttctgttcctgccttagtttgcttaagataatggcctccagctgcatccatcttgctgcaaatgacatggtttccttcttttttatggctgtgtagtatttcatggtgtatatgtaccgtattttctttatccagtctatcattgatgggtatttaggtccattccatgtctttgctattgtgactagtgttggaataaacatatgagtacacatgtctttttggtacaatgatttgttttcttttgggtacgtatccagtaatgagattgctgggtcgaatggtagctctgtttgaagatctttgagaaatctccaaactgctttctacactggctaaactaatttacatttccaccaacagtgtataagtgctcccttttctctacagcctcaccaccatctgttatttgtttgacttttcagtagccattctcactaatgtgagaaggcatctcattgtggttttgatttgcacttctctgatgatgagtgatgatcagcattttttcatgtttgttggccacttgtatgtcttcttttgagaagtgtctattcatgtcctttgcccattttttaatggggttatttgttttttgcttgttgatttaagtttttcttatagattctggacattagatacatcgtttgtgaatatttctcccattctgtaagttgtctgtttactctgttgatagttttctttgctgtgcagaagctctttagtttaattagattccacctattttggttgttattgcaattgcttttggggacttaagccaaaaattctttgtcaaggccagtgttgagaagggtatttcctaggttttcttctgtaattttaatagtttgaggtcttaactttttttttttttttggggggggacggagtctcgctctgttgcccaggctggagtgcagtggcgcgatcttggctcactgcaagctccgcctcccggtttcacgccattctcctgcctcagcctcccgagtagctgggactacaggcacccaccagcatgcctagctaattttttgtatttttagtagagacggagtttcacgtattagccaggatggtcttgatctcctgacctcgtgatccgcctgcctcagcctcccaaagtgctgggattacaggcgtgagccactgcgcccagccgataagagtttttgaaaacagaaatcagtatgtattttatcaaatgatttagagtacaaaatttttctctcttaatgtgatacaacaagagaatgactttgaaaaattttctaatgtagaaccagtcctgaatttctgagattaattcattcaacaattcattcattcaacaaatatttattgaatgcttattatgttcaagtagggttctcagcactaggaggaggaacaaaagagaatcaacagaacagcagtgaatcaaacagaatcaaaattcttgggccataccacccggaacaggcctgatctcccctgctctcagaagctaagcagggttgagcctggttagtacttggatgggaggactagagtgcctacctgcaggaagtacccattctagttggggggaaacagagaacttttgttaaaacaatgtaaagtattctggagaaaaataaaacttggaaagggaatatgaagagaagtgtgtttgtgtgatttttttttttttttttttttttgagaaggggtcttgctctgccacccaggctggagtacagtggcgtgatcttggctcactgcacctcccccgccttctgtgttccagtgattctcctgcctcagcctcctgatgagtagctgggattacaggtgtgtgccactacacccggctaatatttgtatttgtagtagagacgaggtgtcaccatgttggccaggctggtctcgaactcctgacctcaggtggtccacccaccttggcctcccaaagtgctgggattacaggcatgagccaccatgtccggcctgaagtgtgtttgagtgatttttaaacatggtggtcaggaaggaagtgcaggagagagccaggtgacttcctggaaaaacattccagacagaggggacagcaaatacaaaggttctaaagaagcaaaatctgggctgttcaggaaacagaaaggacagctgcagagctggagtggagtgagcaaggggaaaggagtgggaggtgataataggcagatcatgtaggtcactggaaagactctggcttttaatctgacagattaaaacgggaatcacaacagggttttgagcagagcagggacaggatgggaattacactttaaaaggatccctctgactgctctgtggagactgtgctaaggtgcagtgaaaacagaaccaaagagaccagtgaggagaatgctgcagtgattcaggtgagagaggaagatggcctggaccaggggggtaacaggggagatgatgagagctaactggatttgggggttgactggatctgcagaaagattggatagggtgtgtaatagagaagagtcaagaatgacttcaaagtttttgcctccaggttagattggacattaagatggtggagactgcaggaaagcaagtttagggagaaaagtaggaattgacttttgagcatattgcccatttgagatgctatttatgagagttggatttatgagtatggagttctgaggagaactcccacccagcaagagatagaaatatgggagtcatcggctgggtgcggtggctcacacctacaatcccagcactttggcaggccgagatgggcggatcaagaggtcaggagatcgagaccatcctggctaacatggtgaaaccccatctctactaaaaatacaaaaaaattagccaggcgtggtggtgggtgcctgtagtcccagctacttgagaggctgaggcaggagaatggtgtgaacccgggaggtggagcttgcagtgagttgaggagatcgtgccactgcactccagcctgggggactgagtgagactccgtctccaaaaaacaaagaaatatgggagtcatcagtctacaggtggtatttaaagccacgaggcagtaggagtttatgaggggagcaagtataggtagaaaggccatctaaagactgtactctgggccgggcgtggtggctcatgcctgtaatcccagcactttgggaggccaaggtgggtggttcacgaggtcaggagtttgagaccagcgtggccaatatagtaaaaccctgtctctactaaaaaatacaacaatttgctgggcatggtggcgtgtgcctgtagtcccggctacttgggaggctgaggcaggagaatcgcttgaacccaggaggcggaggttgcatgagctgagacctcgccattgcactccagcttgggtgacagacaagactgcgtctcaaaaaaaaaaagactgtactctggggcacttcaaggtcaagagatcaggaggatgaggaagaaccggcaaaggagactgaacctgtgccgccagaagcagcgggagaatcagaggaatgtgctgagaaaagttttctattttgtctttttgagacagggtctcgctgtcactcaggctggagtgcagtggtacaatcatggctcactgcagccttgatttcccaggctcaagtgatcctactgcctcagcctcctgagtagatgggactacaggtgcatgccatcacactggctactttttagtttttgtagagatagggtcttgtcatgttgcccaggctgatcttgaactcctgggctctcatgatcctcctgccttggcctcccaaagtgttgggattacaggtgtgagccaccacgcctggctgagaaaagtatttttaagaagagggagtgatcggccaggtcaaatgctgctgaaagactgaataaaattaagaaatgaacattgaccattggatgtggcagtgcagaggtcatttcgtggagtgactggggtgagagtctgtgggaaggactcagcagagaacgggagaagacaaatggagtcagcacatagacacaacgctttgaaaagttttgtagagaatggaaagaaacaaataggatagtagttgggggaggagtgaggctaagtgactttaccacacgggagaaacgtcactaaatttatctgttgttgggagtgacccagtgaggggagggactgctggtgcaagggagcaggggagctgctggggccctgcctgagaagctgcaggtggtggatccagagctccaggggaggcctggctttggctcggagcctggaccgtccatccatggtgagaggagaggacacagaattgggacacaaacatagggaggtgggtggttttgcctgtgtggggaggtggaagttcactcttaaatgcttctcctggtttctcagtgatcagaagtgaggtcagcagctgaggctaaggatgaaggagaaagtgttggaggtttgaggaaagaggagagagtctgaatagcttttctggagagaaagcaagacagagagaaagaaggagaatggtcaacagcaacatagtaggattcttaggaagcaaaaagggctgcgtgatcatgaattttgaagcgagattgttttttctccagacacactgagctgaatgggtgcaggctccagcttgtaaacttttgctctttttattgaccttttgcacagaaccaatattttgctttaggccaggcgcggtggtgccttcctgtaatcccagcactttgggaggccaaggtgggcggatcacctgagatcaggagtttgagaccagcctgaccaatatggtgaaaccctgtctctaataaaagtacaaaaattagctgggcctggtggcacgcacctgtagtaccagctactcaggaggctgaggcaggcgaatcgcttgaacccgggaggcagaggttgcagtgagccgagatcgcatcactgcactccagcctgggcgacagagcaagactccatctcaaaaaagaccaaaaaaaaactgctttattgaccaggtcaaacatcttccctttcacttctgcctttattaattatttctttgaggtctcccatctttgagagttgaacatttggcttctttattatcaggggtttttttttcttttttttgagacgtagtcttgctctgtcgcccaggctggagtgcagtggtgcgatcttagctcactgcaagctgtgccgcctgggttcaagcgattctcctgcctaagcgtcccgagtagctggaactacaggcacaggccaccacgcccagctaatttttttttttttttttttttttttttttttggagatggaatctcactgtgtcacccaggctgttgcgcaggctcgtaatcccagcactttggaaggccgaggtgggcagatcacttgagcccaggaggttcaagaccagcctgggcaacatggcaaaaccccatcactgccaaaagtacaaaaaaattagccttgtgtggtcgtgtacacctgtggtccctgctacttgggagcctgaggtgggaggatctcttaagcctgggggcagaggttgcagtgagcagagatcacgccacttgtattccagcttgggagatggagtgagaccccgtctcaaaaaaaaaaaaaggcatgtcttttatctgagtcttttaaagcatcctttgaaagagttttatatttttcctcataaagattttgtgcatttgtgttaggttaattccaggatacacaataatttctggtgctattgtgtcatatcttaattcacattttctcattacttattgaatcagtagtatcagttacatcatttatgtatggctgcataataaaccactccctaaactcagtgaataaacacaaccaggccaggcacagtggctcacagctgtaatcccagcactttgggaggccaaggtgggcagatcacctgaggtcaggagttcgagaacaccctggccaacatggtgaaatcccatctctactaaaaatacaaaaaaatgagccaggcgtggtggtgggcacctgtaatcccagctgctcgggaggctgaggcaggagaatcgcttgaacgaaggtgaaggttgcagtgagccaagattaggccactacactccagcctgggctacagacagagcaagactccatctcaaaaaaaaaaccacaaccatgttattactcatgattctggggggtcagagtttcaggcagctctctgcagaaagtgcttcacatgacatcagtggggtgactggactgtcttagaggcttcaagatggcttcattcacatgtttgagggcctggtggtgggcaggagagcaaaggcacattgcaaaggggtggatccggagaggcatgattcactggggatagtttttaatattttaccttagtgaggaggaacattgtattggttagatttatgtgtcaatttgactgggccatggggtgcccaggtatttggtcacacattattctgggtgtttctgtgagggtgtttttgggtgagcgtaacatttaaattggtaaactgagtcaagcagattgccctccataatgtgggtgggcctcatccaataagttgaaggcctgatcagaacaaaaggctcaccatcccccaagtaggagaattctcctgcctgatggccttggcctttgaaatgagtcattggctcttcctggttctacagtagcttcctgacttcacacttaaactgagacattgattcagacttgggctgatttggatttgccagcctccataattgcataagccaattccttctaataatccttttttattccttatgaatgaatgaatgaatgcaccctagtgactgtttctctagagacccctgactattaattttttttgtttttttttagatggagtctcgctctgttgcccaggctggagtgcagtggcacaatctcagctcattgcaacctctgcctcccaggttcaagcgcttctcctgcctcagcctcccaagtagttgggactacaggcatgtgccaccacgcccagctaatttttgtatttttagtagagacggggtttcaccatgttggccaggatggtctcgatctctggaccttgtgatctgcccacctcagcctcccaaagtgctgggattacaggcatgagccaccatgcctggctattaattttttaagtgatcatttacacagcaatgttggtgaactttctgattcataaattttttgcttccctaataaaccttataactctaatttatttttcttgccttataatgatggcaaagacttccaatactacaattaaatgtagctttgacaatggctatctttgccttttttccccaattcaaagcaaaatgagtctgaaatttctcagctaaccataatgtctttctgtaggtttttagtagatgtcaagttaagggtattctgttcctaactttctgatagttttttttaaccataaatagctgtttacctttgccaaatgccttttctgcatttactgagataactgtatgttttgcttttatattgattaattttctaatgtcaaattattttgatgggcctgacttttgtcctcttttctatttgatttactaacattttatttagaattttaccatctttgttgataagtaaaatgagcctaattttattttcttttactgttttatatgactttagaatcatttatacctgctccacagaatgatttgggtaactttctatttttattttctggaacaacttgcacaagacatgaggttttattccttccaagtttggtgaaacttacctatggaattatcaggaccagagaatttgagggttgtggaggatatcttgattaccaatttctttcttttttttttttttttttttttgagacaaggttttgctctgttgcccaggctggagtgcaatggtgcgatctcagctcactgcaacctctgcctcctgggttcaagcaattctcctgcctcagcctcccaagtagctgggatgacaggcctgcactaccacgcccagctaattttgaatttttagtagagacagggtttcaccgcgttggtcaggctggtctccaactcccaactgttatgtgcgtccacgtgaagagagtctaccaacaggctttgtgagagcaacaaggctgtttatttcacttgggtgcaagtgggctgagtccacaaagagtcagcaaagggagataggggtggggcagctttataggatttgggtaggtagtggaaaattacacttaaaggtggttatctcttgtgggcaggggaggggtcacaaggtgcagggttgggagatcatgagattcattgtccaggggaggaatgtcacaaggtcgattgattagttggagtggggcatgtatatgtgcacgtcacagggattatgatggcttagcttgggctcagatgtctgacattgaggatccttctttatcttcctctgatgcccttctatgagaatgaatctgttttggaagaaaacgcaattaagattctgcatcacaacaaccattagctccaaatctgtattcattccttttattcattataagtctcatctacccgaagagataacttttttgaagacaggaattatatgctgtttaacagtgctttgattcttccacagttcagtcatccttgctaccttgcgggggactggttctaggatactgcttccacagcataccagaatctggatgctcaatcccttacatataatggtgcagtatttgcacataactaacacacatccccccatatactttatttacttacttagagacaggatcaccctctgttgctcaggctggagtgcaatgtcacaatcacagctcactgcagcctcaacctcctgggctccagtgatctgcccacctcagcctcttgagtagctgggactacaggtgcataccaccacactggctaatttttcatttttatttttagtaaagacaagatctcactatgctgcccaggttggcctcccaaagtgttgggattacaagtgtgagccaccgtgcctggtcccatgtactttaagtcatcactaataaaatgtatagatattgtacaatggtgacagttgttatattgtactttctatttgtatttttattgtttcttttttcaaatattcagcctcatctaattgaatctgaagatgtggacctgctgatgaagagggctgactgtatctaacttagggtcttgcatgcagctggcacttaatacattttattgactgttttagctaacattcaacagacaattcctaataataatttaaaaaaaactcttaaaagtaggaaataaaggaaacctgagtccttcctctaaagtggcatgaaaaccagcctggaaagcatagcgagaccttatctctacaaaaaaatttttaaaattagctgcttgcctgtagtcccagccactcaggaagctgaggcaggaagatcccttaagcccaggagtttgaggttacagtgagctagatcacaccattactccccagcctgggtgacaacaaggccctgagaaagaaaaacaaagaaaggaaaggaaaaaaagggaaaggaaaggaaggaaagagtataagtattgaaaaggaagagacaaaactatcattatttgcatatgaaatgataaatgttagacagcctaagaagcctgagagactcaactaagattttactggaagtaatatgagaattcagtatggtatgtcagcctgggtgacacagtgagatcatgtctcaaatttttttttatctacataagcagaataggcacaaaaattatctaagatatcttttttttattaatttatttttattttttttttttagacagagtctcgctcttgtcaaccaggctggagtgcaatgacacgatctcagctcactgcaacctctgccttcccgggttcaagcggttttcctgcctcagcctccctagtagctgggattacaggtgcctgccaccatgtctggctaatttttgtatttttagtagagacggggtttcaccatgttggccaggctggtctcaaactcctgacctcaagtgatctgcctgccttagcctcccaaaatgctgggattacaggcatgagccactacgcctggccctgggcatctttttaaactgcaggcactgattcagtaggtctgagctgcgggcagagacccagtacttgtctaataggcttcctctgaagccaggctgcaattctgcaccacacttggaagagcaggttcaagaccagtgtatcttctgccatttcaaactactcaaaaatccttcctcctatctcaaggtctgtctcaatgtaattccaattgcatccccaccacactggtcctggctacttcctgcagaaccacatggaacaaatttaattgacctgaacttgatagcttatcagctatgttaaggcagctagctgttagggtcccttgagttttcttttcttttcttttgagacagggtctcactctgtcacccaggctggagtgtagtggcacaatcttggctcccaggttcaagcgattctcatgcctcagtctccccagtagctgagactacacgtgtgcaccaccacgcctggctaatttttgtattttttagtagagatgggttttcgccatgttagccaggctggtctcaaactctgagcctcaagcgatctgcccaccacagcttcccaaagtgctggaattacaggcgtgagccactgcgcccagccgacaattagatatctttgaaagaaagactctatagcagttgatgataacgcagaagtttttagttttagtttattgacgtgacccttctcctgactgtgtaaccacttatcttcctcttcccattcatctaatatggggtggtataatatgtgatattaccaataaaattctaatatatgctttttgtggaaaattcagaaaacatcgaagctaaacatgaaaatctgccaggcaaggtggcttacccctataattccagcactttgggaggccaaggcaggcagatcacttgagaccaggagtttcagacaagcctgtccaacatggcaaaaccctgtctctactaaaaatgcaaaacagcctggcatggtggtgcacacctgtagtcccagctacttgggaggctgaggcaggagaatcgcttgaacccaggaggtggaggttgcagtgagctgagattgtgccatttcactccagaagcctgggcgacagaatgagacaaaaaaaaaaaaagaaagttgaaaatgaaaatctcatatgatgccatcatctagtggcaactactattgacgttgggtatatttcttttatttcttttctatttgcatattttatcttgctaaaactcaatatcttacctgttttaacaatagatgttcattacagaaaaagtggaaaatatgaatatgccaaagaagaaatagaaatccccatggtcccattacctagaaacaacctctagttacattttgacgtgtttccttaaagatgtttaaattggccaggcacagtggctcacacctgtaatcccagcactttgggaggccaaggcaggtggattacctgaggtcaagagttcgagaccagcctgaccaatatggtgaaaccccatctctactaaaaataaaaaaattagctgagcatggtggtgggtgcctgtaatcccaggtacttgggagaagctgaggcagcagaatcgctttaactcaggaggcggaggttgcagtgagccgagattgtgccactacactgcagcctgggcgacagagtgagactgtctcaaaaaaaaaagaaagaaagaaagaaagaaagaaatgggggatatatattctatacacattaaaaaggtagtaaggaaatactaaaactagttctacataaattcaacaacttagatgaaatggaccaattcctcaaaaaaatgaaaataatctaccacaattcatccaatatgaaatggataataagaacagccttatggctattaagaaaattaaatttgtaattaaaaaattcacaaacaagaagtctccagactcaaatgatttcactagacaattctaccagttaaaaaataattaacaccgccaggcaaggtggctcacacctgtgattctagcactttgggaggccgaggctggtggatcacaaggtccagagatcgagaccatcctggccaacatggtgaaaacctgtctctactaaaaatacaaaaattagctgggcatgctggcacgcgcctataatcccagctactagggagactgaggcaggagaatcacttgaacccgggaggcagaggttgcagtgagccaagatcatgccactgcactccagcgggggtgacacagcaagactccgtctcaaaaaaataataataataataattaacaccaaccctacccaaactctttcagaaaatagaaaagaacattgcttaatcattttaagaagttagtatttactctgacaccaaaaccaaaggaagcacacacaaaaaaggcgaaaactgccaaacaatacccatcataaataaagatgcaaaatccttaacaaaatattagcaaatagaattaatatatgagaattacacaacatgacaaaggggggtttattccaaggatacatagctgatttgatatttgaaaattaaaaggctaaaagaaaaaaaatcatgtcaattaatttcagaaaaaaagtatttgacaaaatttaacaccaactcataataaaattcaggtaaaataggtatatgggggctagtcgcggtggctcacacctgtaatcctagcactttgggagaccaaggcgggggcgggggggggtggggggtggatcacgaggtcaggagttcaagaccagcctggccaaaatggtaaaaccccatctctactaaaactacaaaagttaaccaggcgtggccgggtgtggtggctcacgtctgtaatcccagcactttgggaggccaagacaggcagatcatgaggtcaggagatcgagaccatcctggctaacacagtgaaacaccgtctctactgaaaatacaaaaaaaaaaaaaaaaaaaattagccaggcttggtggcgggtgcctgtagtcccagctactcgggaggctgaggcaggagaatggtgtgaacccgggaggcagagcttgcagtggaccgagattgtgccactgcactccagcctgggctacagagtgagaccccgtctcaaaaaaaaaaaaaaaaaaaaaaaaaaaaacccaggcgcagtggcaggcgcctgtaatcccagctacctgggaggctgaggcaggagaatcgcttgaacctgggtggcagaagttgctgtgagctgagattgcgccactgcactctagcctgggcgacagagtaagactttctctcaaaaaaaaaaaaaaagtatgaaaggtatatggggagaatttcctgaatttgattaaaaaaaaaaaaacctgccaaaaaattagagttaacattataaagtgctgggattacaggcacgagccactgcacccagccgtcttttttttttgcttgtttttgagacagtctcagtctgctgcccaggatggaatgcagtggcgctggaatgctgaagggggcctgcccctccacacctgtgggtatttctcgcaaggtggagatgagagactgagaaaacaaataagacacagagacaaagtatagaggaataaaagtgggcccaggggaccagcgctcagcaagcaagggcctgcaccagcactggtctctgagttccctcagtatttattgatcactatctctaccatctcggcgagggggatgtggcaggactatagggtaatggtgggtagagggtcagcaggaaaacgtgagcaaaggactctgtgtcataaacaagtttaaggaaaggtgctgtgcctcgatgtgcacataggccagatttacgtttgacttcacgcaaacatctcagtgcagtaaagagcagtactgccgccagcacgtctcatctccagccataaggcggttttctcctatctcagtaaatcgaatgtacgatcaatcgggttttacaccgaaacattccattcccagggatgagcaggagacagatgctttcctcttatctcaactgcaaagaggccttcctttttcactgatcctcctcagcacagaccctttacgggtgtcgggctgggggacggtcaggtctttcccttcccacgaggccatatctcaggctgtctcagtggggggaaaccttggacaatacccaggctttcttgggcagaggtccctgcggccttccgcagtgcattgtgtccctgggtactcaagactggagaatggcgatgacttttaccaagcacactgcctgcaaacacatttttaccaaggcacatcctgcacagccctaaatccattaaaccttgagtcaatatagcacatgtttctgcgagcacagggttgaggatagggttacagattaacagcatctcaaggctttcgggggacctgccccgataatcatgtaggttcttttctatttttcctaagcgtcggccggcttgagaaataaagggacagagtacaaaagagaaattttaaagctgggcgtccggggtagacatcacacgttggtaggatccgtgatgccccacaagccacaaaaaccagcaagtttttattagggcttttcaaaaggggagggagtgtgcgaataggtgtgggtgacagacatcaaatacttaacagggtaatagaatatcacaaggcaagtggaggcagggtgagattacaggaccacaggactgaggcgaaattaaaattgctaatgaagtttcgggcactattgtcattggtaacatcttatcaggagacagggtgttgagatcaattggtctgaccaaaatttattaggcaggaatttcctctttctaataagcctgggagcgctatgggagactggagtatatttcatctctgcaatttcgaccataagagacaggcgcacctgggggtgctgtttataagcctatacctccaggcgtgtattctcttcctcagggacgttccgtgctgagaaaaagaattcagcgatatttctcccatttcttttgaaagaggagaaatatggctctgttctgcccggctcaccagtggtcagagtttaaggttatctctcttgtttcctaaacattgttgttatcttgttcttttttcaaggtgcccagatttcatattgtttaaacacacatgctctacaatttgtgcagttaatgcaattattacagggtcctgaggtgacatacatcctcctcgactgacaggattaagagattaaagtaaagacaggttggccgggcgcagtggctcacgcctgtaatcccagcactttcagaggccgaggtgggtggatcacgaggtcaggagatcgagaccatcctggtgaacacggtgaaaccccgtctctactaaaaatacaaaaaattagctgggcatggttgcgggcgcctgtagtcccagctgctcaggaggctaaggcaagagaatggcctgaacccgggaggcggagcttgcagtgagccgagattgtgccactgcactccagcctgggcaacagagcgagactccctctcaaaaaaaaaaataaataaaaaataaaaaaataaagtaaagacaggcataggaaatcacaagggtattgactggggaagtgataagtgtccatgaaatctttacaatttatgtttagagattgcagtaaagacaggcataagaaattacaaaagtattaatttggggaactaataaatgtccataaaatcttcacaatccatgttcttctgtcatagcttcagccagtccccccatttggggtccctgacttcccacaacacaaggcagcagaatttttcttagtacagatcaaaatggagtttcttttatttatttatttattttttattattatacttttaagttttagggtacacgtgcacaatgtgcaggttagttacatatgtatacatctgccatgctggtgcgctgcacccaccaactcatcatctagcattaggtatatctcccagtgctatccctcccccctccccccaccccacaacagtccccagagtgtgatgttccccttcctgtgtccatgtgctctcattgttcaattcccacttatgagtgagaatatgcggtgtgtggtttttttgttcttgcgatagtttactgagaatgatgatttccagtttcatccatgtccctacaaaggacatgaactcatcattttttatggctgcatagtattccatggtgtatatgtgccacattttcttaatgagtctatcattgttggacatttgggttggttccaagactttgctattgtgaataatgccgcaataaacatacgtgtgcatgtgtcttcatagcagcatgatttatagtcctttgggtatatacccagtaatgagatggctgggtcaaatggtatttctagttctagatccatgaggaattgccacactgacttccacaatggttgaactagtttacagtcccaccaacagtgtaaaagtgttcctgtttctccacatcctctccagcacctgttgtttcctgactttttaatgatcgccattctaactggtgtgagatggtatctcactgtggttttgatttgcatttctctgatggccagtgatggtgaacattttttcatgtgtcttttggctgcataaatgtcttcttttgagaagtgtctgttcatgtccttcgcccactttttgatggggttgtttgtttttttcttgtaaatttgtttgagttcattgtagattctggatattagccctttgtcagatgagtaggttgcgaaaattttctcccattttgtaggttgcctattcgctctgatgatagtttcttttgctgtgcagaagctctttagtttaattagatccccaaaatggagtttcttatgtcttcctctttctacatagacacagtaacagtctgatctctatttctttcccccacagaatgcagtagcatgatcatggctcactgcaaccttgacctctgtgggctcaggtgatcctcctatctcagccttccgagtagctgggcctataggtgcatgccaccactctcggctaattttttgtagatatgaggtttcgccatgttgcccacgttggtttcaaactcctgagctcaactgattcctctgcttcagcctcccaaagtgctaggattacaggcatgagtcaccatgcccagtccttgaatggttttaaagtgttattcttatctgaatatttgttttaaacaatagtatttaaacttacaagaaagcctaaatacaaacctctgcatgttaaccctgtatacatttttctatgctgtcacttacatttttgaatgtactgctttaaacttcaaaacaagcagtctcccccaggtctcccatcaccttctgaaatactaacttacattaactaatataaagctacaaattatgttagttgggtggctggaaacaaagaatgtgccataaaaataaggcaaatgtgaatgtgtacatcagtttgctaagttttttgccactgttcagcctcttaaattgtggtagcagctattgttcacattgatttgtatatatctgtagtacaaggaagcatttctaaaggaccttgctcattgttctgcacaaaatagccacttaatatttgttgaatgaattgctggcactatctctggtatttttatttttatttatttatgtatttatttttgatacggagcctcattctgttgcccaggctgaagtgcagtggcgtgatcttggctcactgccacctctcgggatcaagcgattctcgtgccttggcctccctagtagctgggactacaggcatgcgccatcacgcctggctaattaatatatatatatatatattttttttttttttttttagcagagacgggatttcaccaagttggccaggctggtcttgaactcctgacctcaaatgatccgcccgccttggcctcccaaagtgttgggattacaggggtgagccaccctgcccggcctatctgtggtatttctagtgtgatgtctagaacttcatatacttttttggattactttaattgtaaggctgtatccaaactgatgaaatgctctcagaggtaactatctggagaggtgactacactgatgcattaaaagaaatgactggcatggaataaggattaaaatatattaatccaaaacatttaaaattgcattaataacagcctaaagcaaaactaatgaatcacataaaaaatctcccacgctgttgttcttagtagtttacattgtgctacatactttcgcatgcatatgcatacaacttctattctgtttttaaactttgcattacatatacattcttccatattatatgatcttcataaaacttgtcagttaaatggctgcattaaaaagcatgcggttcatggaccattatgctgttccctcattccttttgttattaatggaatatagcaaagaacatcttccgtactattatttatttgtcaagaatagggccaggcatggtggctcagggagccgagcctgagagcactttgggaggccgaggcaggcggatctcttgaggtcaggagttcgtgaccagcctggcaacgtggggaaacctaaatgtctctactaaacatgtctctactaaaaatacaaaaattaatggggcgtggtggtgcacacctgtggtcccagctactccagaggctcatgtgagagtatcaccagagcccaggaagttgaggctgcagtgaggcgtggtcacactactgcactcaagcctgggcgacagagggtgaccctgtcaaaaaaaaaaaaaaaaatcctagcagtaaagttacaaggtcaaaggataaggtacacatttaaaaagaaattttctttctcctcctgagataactaaatacagcagtgtatgaacaacccttcatacattactctccaaggtttatcttgttaatcctttcagatgttatcatctccctatccttggctgcacctgaaaagagcaggagccggcaggtaacccgatcgcctcccccaggtgagtctccgatggaggtgtcaactacaagaccaggagcagagcagtcctggggctttgctggaaccattggcgtgggaatgctgtctcttccctcgcccgagagacgccagattcccagcgggcagcggactcggttctaaccttcctcgccccagcctctaggagcgctctgcacgcagtgggcgtctaataaatgcagtcggccctgcttggacaaaagctctccttaagtggaccggacactatgcccctccaggtgccagagttgtcgcccccgctgccactttgctccctgcgcgcgttccgcgtgagaccctcggcggcacctcacccactccctgacggccggtgccagcccggggcaccctgggtactctgcgcgcgcccgctggccccgcccggccccaacggccccaactcccgtctcctcccagtcccccggagccgaccagtggtggcggcagccccaggtcccgggtccctcagacaaaaaggcgggtggaggaggagtagccgagcccagagtcctgctccggcgccgccgagcaccgcccgcctcagccgaccagccccgtcggctactgggcctagcctagaggagaggagggaaaggccgcggaggccgcgaggagacggctggggcgccagcggccggctgccgcctagttgtgctgcccggaccaaggaaggagaagtgggaggagcggggagctcagcggctcaggacgacgacgctcgccacatccgggaccctccggccgtggcggtcgcagcgccggcagctcgggcctcagcccctgcctctgtggtgactccgccgcgcttcgacgtcgcccctgtccccgtcccgcccgccgcccccgccaaccccgccgccggggacatgtccaacccctgaagccggaggaacgggccagtcagactgcgcccgacaggtgatggggagcggcggccgggctgggcagccgccgggtgggcgagctggcgcggggtacctgttgacttgggaagggccaggatcgcgatcaatggtgagttgggggtcggaggagtaggaaggcctagttcagggagagtaattggaaagccactcgctctggtttggacattctttaaaaagccgaggatgactcggggaggcggggtagtcttttgtggaggggaggatacacccgttcgcatcgcagcggatttcgggctgaaaagtcttggtcaaggagcccgacgctgcctcccggggctcggggagcagcagcccctgggctacggcccaggtgggctcgtgaaggggattattgaatccggttgcagactgcgcgcagtaaacactccttaaagatggagcgcttaacgggagggtgtacgtgtgtgttcccgggttgttaccttgcacacccacttatgcccgcttgcaaaacctttactccccgcctctggccaccgttgccggggccgcacaccttaaactcaggtctctctgaggagaggagactgaggttgacttttcccatgtgcctgtctgatccgacggctcgggctcattgtacactgtgttttggaagtgtctgattgtagggtggcatgtttggggttgtaccttgtaggccgcagaacttgtgtcacttctaactccagacctgctttaaaaacacacttttggaggcgggtagggggtacttttctaactatgtgctcatacaaactttagagcaaactttctcttactctccccaccctcccccttcctttttctaaatggaaaataatgtccggaggggttgctagatagaagactacacttacaaagtgtttatgattccaggcgcatgaaatctttaacattacaggtacatttttgcttacagtgccatttttggtattcttacatggacatgtcacccccattttaggaaaacttgtatttggtttgaaaaggaattgaaatcacgacgttatcctaccttcaccatttacccctgataaattgtccacgtttatattccgatgagtggtgagaaagataattttccgtagaggatttgtgtgtgcgtgcacgtgtacgaataaactgtaattatgtttgtccacactagactttgagatttatttgagctaattttgtggttgaatgcctgtgtgtcacatcccagtacagctagatgaaaacttgcagtgaatttggtatttgagaatttatctcgaatgtctgttggctgcaatttaaataatatacgaccttcatgacagttttgctttccctagggaaaaatgcagggaatcattaactgagtggttcttaatggaaaacctggattggaggatacttgtatttccccctactcccccccattcaatgtccttatattgggagaagtcaatggaaacctttttaggggatctttgttgctttagagtttatctgttgctatctggaatcagtgatcatcgaaagaacatgcgatcccaggtgtgcagaaagcatcagaaataagctgtttccatttacttccctcaaggctacatagagaaaatgagggaaaaaatagggattttgattttctgcagataaaatgagttgaggtttttagtatgactcagtagatcttaaagtgtttatctgtggtttctgtactgcctatgatacattataaaaatttataagtaaagtttgttaagaggaaagattatgcttatattttaggggaagagggaatattgaactacatttatagagtgattttgtttcaggtttttctgaggattttttaaataccctgtgtccacttaataggaaaaacagtttgaggtactctgagtttcttacaactatttgtctctgaatagttttctcttaaaatttgacaaatgttaaaaacattgtccttcctcctttggttatagtggagtcttctgttttgccaggaaagcgaacattttttttttcatttttgttcatcatttacaaattagatgggatatattttagcaaatagatctcaagagctggatttaattagcagctttttaggacataaacattaaagggttagatggaaaagattgttttgactgacaggataaatgacagggctgtgtttgatgtgcgtccaggaattggtctggagctggtgcccaacttctcagtccatcttgagaagccaaataaaatacttaacctaggcctcattttgtttaaaaaaaaaaaaaaaagttgattctttgttaagaccttaagaaatgtttggcatacctttagactaagtgtttaacagttcatttagacctgggttccctaatagaggaaaaaaaatcacttaaaaaaagacagatcccacagtgaatttatatttggtttacaatacacttgggctgtaagatgttttaaaattattgttctttgctttaagttaataccatattagtattttaaatttatagagtacctttgatttcaatatgctgtataaattttagttacttggtaataaccttattgcggaattgcctttttactgaaaggtataaacatttcttgcatggtgacacacacacacacacacacacacacacacacacactcacacactcacacactcatacactgtctttctgaaatatttgaaccgtgagagctctgcccacaattgatattagacctttccacatattattcttaaaaccacagtcagtgaattgtttggtatttgtcaatgctaagaaggtgggactaatttaataatttgatcccaaattttagattcctcaggcaattgggggttagaatccaatttcatccatcaagctacttctgttctttgtgacacattaacatatgatcattaaaatgggctgtatggtaacactatcaacttcaactaatatttctagaacaaattgattataaaatgtataatttctataccattatacctatatgactgtcagatacaggcttttcttacaatggtttggatagaaaaatattctttacagtaaaaactttaggataattttcagaccattattgtttttgaaaaccaaaggctgcaaaaagcagtttaatgtaatttctaatattttaaattcttaggtatggagaagtagaataagattactccttcagaacatttatttcagatctttttataaatttaatgtttttgtatgctgcttctcatattattaatttcaaagcccttggcagtaaggaggttaaccttgtctataatgtaaggaaatttaactttaaaaatttccctttatatatgctagcgtcttaatcttgtttcactacatattttattaattcaaggccttgaaaattatggctttattctattacacaggtttttaagtatgcctatacaccataatgacgttatttatttatttatttatttgagatggagtttcgctcttggctggagtgcagtggcgcgatctcagctcactgcaacctgggcctcccgggttcaagcgattctcctgcctcagcctcccgagttgctgggactacaggcgcatggcgccacgcctggctaattttttgtatttttagtagagatggggtttcaccgtgttagccaggatggtctctatctcctgacctcgtgatccgccagcctctgcctcccaaaatgctgggattacaggcgtgagccaccacgcccagccaagaaattttttaaatgcaaagttctctagccactttgtatttaccactacatgtctcactaacttcaggaaacctgatagcttttgaccacattagagtaacttggctctcaagttaactttttgtagaatagtataatcaggttaagttgaaacctatctttctttagtcttccaatataattataggacactttttggttaaaccattgttccatgtttacattattatgattatgtaaatatccatagttgggtcacatgggtacaagaattatattttctttcttgacagcttttgttttttctgaaattagtagctacttttcccttttgtttagttttctattcctctcctagctagaaatgagaaattacatgtcataatcctcaaactctcctacagaactgaagatcttttctccatatattcagttctgtcagtattcctttggctttgtttcttcttggagatacccctcctgggggtctgtgttctctttcttcagcctggcataatggttctctaagacctgctgggcagttgtcctgggacttgcctgtattgttatgttggcaatttcctttgtctcttctagatttagtgacttcctattttttgtttactctcctgatttggtgaactctatcttctgttgtcattttgagaaataatacaaagatgggaagaaagtttagatcttatcagaaaatatattttgatttcttatctgttggtatggttcgagtacaggcttctagatgaaataggactttatctccaaatgttgaatacattggtccattatcttctagatttagatccgaactgttgagtagaaatataatgtaagccacaaatgggagctcatctgtaattttaaatttcctagtatccacattaagataagtaaaaagaaacagatgacgttaagcataataaactgggcatggtggcttgcacttgtaatccagctactcgggaggctgaggtgagaggataacttgaggccggcagtttgtgaccacactgggcaacatagcgagacccataatataatatattatgcataataagcataatttattatgcttaaaatgaagcataatatattttatttaattcaatatatcaaaaatattttctacatggcagtataaaaatattgagctacttacatatttatgtatatatacatatttactatgtctttgaaaaatcagtggttttctcattttatgttaagaaaaatcagtggtttcttttgcagcttgcctcaatgtggactggccacatttgaagtactcaaaggtcccatgtggttggtggataccattttggacagtgtaggttcagagtattgctgatggcatcctgattttgatctgtcatgactgttgttttccactggaagtttctttattcttctgtcgcttgttattttcctttaaaaaaattgtagcccccctagtgggtatgaagttgtacctcgtcatggtttggaagtgcatttccctcatgactaatgatgttgaacatctttgcatgtgctcgttatgttttatcttacagttaatattaattggctaccagaggcttctctcttgcttgtgtctgaggtcattttgcaaaatccttgcctttaattggctaagtgtacaaacaaaagtctaataattaaattttagcccaaaatcctgagtatatatattgtacttttgtctatatggtaacattatattcacctatagaggttgccatctacccctctcagcaaaacatgctgaaacttgtttataaatcatgtatttgttagtgaagtcaaagttttaatagaagctaatagagccctctatttaactttcaattataaaagtctttactttttcttttatgtggccatgtatgttatattacatgaggtttcattaaagtgagagcatgtacttctctgtgtataagaaaaggtaatacttctgattaatttctggcccaggaatatttggacagaatgtttgtgacatgtacacttaaataatacaatatatttcataattttgagtaattcagagttaggctgtcttctagaaggtccataattagcaatttcttattatggtttaatgtagagcttcccaaccttttcatatcatggtacacataaaaaatattatggcacactggactaaacaggtgaagttgcttaagccagtggtgcattgctctgaggactgaggtaatcgatatatgtatttcagcatacctgtaaaccaggcttattagttggacaactggtttaatgtgactttaaaaaaaatgtttggtttgggtaattcagctacttaattactggattctggctctggaattacatgccagtagatatataccaagataggtcgggtaggtgtatttgaaaattggtacatgcatactgaacaatattttagttcatgtcttttcatttgcaagcaacagagaccaagttcaaatcggcttaatttttaaaaagggaatgtactgatttgcataatgaaaagcccgggggtgggcattttttaggcacagctagatcccggggctcaagtttaccttccatattccttatttgaaagctttagtccttacttcagtggtttaggcttttctctatactaggtgaatttttctgatattgctaatttatttaattagcaatactttagactaaaactttgacctcttaatgtcattgaaatagagctaggattctactgacatcattatgttattatattatctttttgcatgagttgatgccatgttactaattggctgtgatagagcctttacgtacttgcaggtatatccacagacaagtacagtaatgcttctccctgcactgcttgtctgcaggaggtgaagtgaaatctgcaagagtcctgctcgttcaaggcctgcatacaggaaagaagcaggggaaaagcgttagaaacagcttttgttctacagcattttaaaatataataggtaggtcaaatttttggtctgtcagccttgacactatcccttgaaagtaggtcatgtcattgaaatgtatttaaaatgtgactgtgataaaagttgtttttttgttttgttttgttttgttttttgagacggagtctcgctctgtctcccagtctagagtgcagtggcgcgatctcggctcactgcaagctccgcctcccgggttcacgccattctcctgcctcagcctcctgagtagctaggactacaggcgcccgccaccacgcccggctaattttttttttattttttatttttagtagagacgggatttcaccgtgttagccaggatggcttgatctcctgacctcgtgatacgcccgcctcagcctcccaaagtgctgggattacaggcgtgagccactgtgcccggccatgataaaagtttttaagattctttttcttggaaagaagttatttaataaactcccttagtgttattagacactagctaccaaaatagcctttttactaactagaattatagcccagcttgagagtggcagatgtgataaaaatatactaaaattgtttttaaaaattttactttcaagattttttaaaactttatattcaatcctgtggattaactcatgtattttgcataatctagccaggctctgaagcatatttgtaactttagggtataaaaagaacaaaagaaaaattttacgcccactgccttataactaccaacatacttatgcagccattttcatttttaggtatattgaaaagtctgattcagttacaatcagtgtatggaatcacaagaagatccataagaaacaaggtgctggatttctccgttgtgttcgtctttttccagtgccatcaaccacctcaaagacactggttgtgagtagatactactgcttttcaaattatatatatatatgtgtgtgtgtgtgtgtgtgtgtgtgtatgtatgtgtgcatatacatatatgtgtgtgtgtatatgtatgtgtgcatatacatatatacatgtagtatatatgtattctcaaatatatatgaaggatatatatatttgagtatgttggtaggggttcaaacataacttcttgtgtatgtctgaaacattggtaaaaattcctggtctaaatttattttgtagacttaaaaaaaatgaaacgttttaaatatgtgaaacttacagctaaatgagagctgatgcttcatttccagttaatttaaaagtattaagaaatgattgatatctagaatggcaaaaaaaaaaggtgtcaggatgtatataccttttaaaatttcttagtacccttttctggttgtggtggatttgtggacaacatgtttttatttaggtgattggagtctttaaggtggcagttaaagagcaattacgaagggataagaatggtataatatataaaactgctgtgacaaaattaaaagttaaagaaagattaaacattattttgagtgtatgacggctctatgaactacttaactgtagctcagtttgtcaccaacctgggtgtttaaaagattagaccaagatcaagacattagaagtggttttcataatggatttataaggtgacttagcataaccaggtgacggtcttttgggtgggtctttccattggaacataaatgggaattcctttttcaacaggttttctgtgtgtgtgtttgtttctatagaattcttgtgtatataatgtaaaaaatactgttagtcttcgtaatgggattttagcccagatgcatatgctaaacaaactcgcataagagctaaagaaattaataaacagaaaaggagtaaatttagcattgaatgttaaatatgttaagagattgtctcttttaatgtagtatgataccacagcataggtatatattgaccttgtgaaaaagaaaaaggcagaaaactgagctagaagttcttagtccaaggtatttaaaggcatctgagaagttcttgtatttctgggctgacagggtaaccaacaggagagaaaggaaacgagttgcatataaaaatgaactgttttcttactcagcaaactgaaaaattataggtcaaatgtctgacattatccctagttcaatttagccaacgtttattgaagacttaatgtgctactgttctaaaccctggctgtataaaggagaaagaggcatgaaccctgtcctctgagaaggaagggcaaaggcctgctggcaaagggagcatgccgcatgggaaggactgaataggagaggagttgctctgcagaatccactgtgtagccaacttagcagcacccatttattttgcaaagagaaaagtgtctgtatttttggttggataaccagggactgtagtttaggggcatggatttttctttgtgtttcttgtgactgtctcattgtattaatttatttgacttttttgatgtgcagtaatactgaatttatcaaatatttattgagcacctacctgatgcaatgttctacggggttggagtggaaaatacaaagactacgatatggtctcctccttttatcaattcacaaataagtagacagatggcatacggttgtaaaagtattcagctataagtactgtaatcaaagtaaaaccagcatgctttgggtgacattgttccttactgtaactttcagggtcaggccagtgttatatctcttttacagatgaggcatctgagagaataaatgagttgctcctgaatgaattagtggcagaactgatgcaaacccagattctacagtttattcttggcttcttattaatacttttttgtgtgcatgtcatttgaaatggttagttaaaaaataataatgacaactaacatttgttgaccatttatgtgccaggcactatgctgtgagttttgcataattatctgatttaatccttaaaaaatatgaggattcacatattgccatatgtgagaaaaccaaggctgacggataaattccttaagaccaacaactattaagactcagactaaagtggtctaaaagttttggagagaaagtgactgcatgttggcaatgtagtacactagtgtttcatggtttttgaaatctgaattctttaaatgataggtttgatttctaatagattgtggaaatttattgtcactctatagacatgagaatctctgataccagctaatgttttcattgctttctttgttgatttcaaatagatcagaggttggatttatgcaaacttgggccaaaggacagttagaagacagtaggtaagtgtgaatttaaagttacatgaattttggtttcattcaaactgacctaaagtctaaataccttttaaatcaaagtatgttaactgtagcttcatagtgttggcctgaattaaatgaatcaggtaaaatgttacagtgaatccaggatccaggttaacttaatttttaaaactttaatgtaaaaaaaaagtgtcgtgaagaactgttgatcctttaggaaataattctttcaaagtatcctaacatagtagagcactgagttcagactttatagatgttattaaagtttactgaaaataattctcaaactagtttttttagtaagaagacaacattctattgaacttgttttaatgtttaatgctttacagctttaaaatctatgctaattgaaaaaaacagaatgagcaatggtagtgtaacactggaaaaagggagaaattgttaccttactcatgaggcacttagtagccttatatgttatttaggtgtcttgaattgacctggagggaaaggcttcagataaaatttgctgagacctttcctaagaatcgatagagatttgatcaaggtgcatagtatggaaggacactgttcatcttggaggcttcttgaattaaagaagaaaaatgtggccgggcacagtggctcatgcctgtaatcccagcactttgggaggctgaggcgggtggatcacctgaggtcaggagtttgagaccagcctggcaagcatggtgaaaccccatctctactaaaaatacaaaaaatttgccgggcatggtgacaagtacctgtaatcccagctactctggaggctgaggcaggaggatcgcttgaacccgggaggcagaggctgcagtgagccgagatcacaccattgcactccagctgggtgacaagagcaagcccctgtctcaaaaaaaggaaaagaaaaaaagaaaaatccaataggactgtcacacttcatgataaagcagaacttagaataagattattttgttatgaacccatcatagaggttttaaatactgaaggtacttgaaggacttcatttcacaaggcagtgaattgggttcatggagaactaccagggtagccacatagcaaagccctactctggttatcttagggaagtatctacaccagcactccccgacctttttggcaccaggcaccggtttcacagaaaacagtttttccatagaccaggctggggtggagttggtttcaggatgattcaaatgcattacatttattgtgcactttattattattacattgtaatatataatgaactaattatacaactcaccataatgtagaatcagtgggagccctgagcttgttttcctgcaactagatggtcccatctgtgggtgatgggagacagtcacagatcattaggcgttagattctcataaggagcaggcaacctagatcccttgtgtgtgtggttcacagtagggtttgtgctcctatgagaatctaatgtcaccactgatctgacaggaggcggagctcaggcggtaatgcttactcacccactactcactcctgctgtgcggcctggttcctaacagaccctggaccaataccccatccatccatggcctgggagttggggatccctgatctacactacagcattactgataattcctgtcatccttagattgagaaggaagcaaaaacaaaaaaaatctcaaaaatcaattcagtcataacagtactttcacatataagtgttccttctgtatttgatttattatgttacataatgcttgccaactactgtctagtagtaacgaaatagttttactagatgtgaatttgcatttatataaatagcagactttgttagacattagaaatatacctactggaggtcaggtacagtggctgacacctgtaatcgcagcactttgggaggccaaggcaggtagatcacctgaggtcaggagttcaagaccagcttgaccaacatggagaaaccccatctctactgaaaatataaaattagccggcgtggtggcacatgcctataatcccagctactcaggatgctgaggcagaagaatcacttgaacctcggaggcggaggttgcagtgagccgagatcatgccattgcactccagcctgggcgacaagagtgaaactccgtctcaaaaaaaaaaaagaaaaaaaagaaaaaagaaatatacctactggagtatactacatagaaaacaaatgttttactcttaaatatgtgtatatatgtatatatatgtatttatttaaagctcttgtgtgaatctgctgttcataataggaccattaataagagagagggaggctggactcaaacattatgattctttagttctgtcattcaaaaacagaatgagttccagttctttcagaattagccctctaacaaataattgtaagtaggtatatatactttttggaaaatggagaaaagaacactagaggactaactttaaaaactatattcccctctagtatttttatatacataaatatgtatataaaatgtatatatttatgtctttaattccattgaagattaaatttctactttgctttctttcacttaccataatcgtttttagtatttataatctttgtaattatatatatatatatatatatatatatatagatagatagatagatagatttttttttttttttttttttttttttttgagacggagtttcactcttgttgcccaggctggagtacaatggcgcgatcttggctcactgcaacctccacctcccaggttccagagattctcctgcctcagcctctcaagtagctgggattagaggcatgcgccaccacgcctggctaatttttttttgtatttttagtagagacaaggtttctccatgttggtcaggctggtctccaactcccgacctcaggtgatctgcccgcctcagcctcccaaagtgctgggattacaggcgtgagtcactgtgtccagccgtaattaatgatttttaaaggatgaagtatatagatatatcacaacttaataattaaaaattttttttgctattataacattgaaacttgcaaacatttttgtacacttcgctttattttttagaatcattgctggtatgaaaaaaaaatctcccaagttgagataattgattcaaggagtacaaagttttttccttgtttaaaactgtgatgacccagctacattgggaggctgaggtgggaggatcatttgagcacgggaaatctactgtattggcatcgttatcacttggatgtgtactttttctatgtatttttttaaaaaatgagattatactgaatttttaaaaactggtttaaatttatcataaacatctttgtttttttggcccataaatacatttctatagcattgttcctttttttttcctactttgcattaaggcttgcaaaatctatagcatttttaatgttgtgtggtagtccatggtgggtatgtaattcatttaaccagttaatagctctgctattaacagcattctggagatgtaaattgaagcccatgaaattctttagttttgaatcttactattattctaaacaaagctaacgagaaaatacattgtttctactgtgattgtattttgataagcatttcacttattttatctatttaaaaactgatggatatagttgtctagcacagttttcataataatgttttgtttacatttgctgagtaggtgtttgtagtgttctgtcctctaaatgggacttaatgtaaaggagctctatgttgaactgatccttcaaaatattcacagaactggaagatttcagaattttgagacccttctttgaatgaagggtcattagatgtaataatactttttgtactaacctattatttaagaagttggattatagtcaagtttgactgtacctctttctgtcttttgggagagttactagaattagaattaaacaatactggagcagcaaagaaggacttcagtgagatatcaattaagctaactttctcattattcagatggggattatctaaaccttgtttgttaagtgttttgttcaagtttacagtgctaaactggttactagagcttgctctagaatccacatctcttggttcttcattttttgcggtggttttatactactctggataatagtgtcctgttaaaactcatggaatccaaggattgctttcttgctggaataccaggatggccctcttgctcgaatacagtatatattttttttctttttttgagacggagtctcactctttcaccaggccggagtgcagtggtgcaattgcagctcactgcaacctctgtctcccagtttcaggtgattaccctgcctcagactccccaatagctgggactacaggcacaggccaccatgcctggctactttttgtattttagtagagatggggcttcactatgttggccaggatggtctcaatctcctgaccttgttatccacccgccttggcctcccaaagtgctgggattacaggcgtaagccaccatgcctggcccaatatattttttagatggtgagattaccaagtattaaacttaatgtggacttttcaaactcctttgtacatgaatatactcttaatatgttatgcctcttcttaagtacagtagtgactctgctatgccctgttactatggtaaagaaggaattaggcttcttccatgaacatgatgaagtgtagaaaactttagaattctaatattactcctaaagggaaaaatctatgggaaaagaaattataaattttagtagaaaccaaagaggtcattctaaagtattaaaataagctaagccagatgttttctaaagatagaaatttttgattatagtaattctttctagttgtatgaatcttagtaatatttctatcatttaatagtaagtcttcagtccagggaccaaatcggcacaggaggacaagttgtggactgcagtcatttatttgataatgatttaccagacaagtaagctaacatcactgaaatcattagagaaatatatagataatatctatatagaaatatatatatataatatatagataatatatataatatatatctatatatataatatatagatattatatagataatatatatatctatatataaggctcccgctgtcttcatcctcagtgtgcctgtgttcttgctaccatcgcagctgaatgcagtgaagggcggtcctctgagaggagcagggtggagatgctaaagtggatgccccctcccattgctgatagatcctcatctggcatgtgctccacccacccaccccattctctgctcccacatatcatagccccatcacagaagatgcgacatgggaaaaaacactgtgtccaccttagttcttttcttaaatttgggcagggatccagggtgtaggttaggaaatttttaatttgccagattgtatgcctatgttgttaaatatacaatgaatctatggtatggtagcagtttctggataaacattacttgaggtcctaaatgcagaagggaaaaagcaacttttgtcagatgcctacttcactttcattcatctctaatattttggatggggaatcatccaaagcttctgagtgcatgaaggtcaagtgtgccagtgtgcagctgggcttcttttccagaattaaaagtattttgggtggtgctgaaggtcagcggaagaagtaaagattgcaagaaaggagaaacatgggcttggggagatcccagaattggggacagaagacctggcactaggctacagcacttagcacctctgatcttgtttttcctcacctgtaaaaggagattaacaatgcttttctgcccgcctcttggggagaagggaagaatataattggtaaaaaaaaaaaacaagaaaagaaaaaaaaaaaagttctgaaaaataagcaacactgtctttatagaggtagccaagcattattaattatccaccccatatcactggtagatacctgtattcaagcagtcacattttagaagtcatgaagttggtgctaataaacctaatctacagaaaaactcttgaaagcatttgagcatttgttctgcgaatagaaaggtttgagattcagagcaagttcagagttggatggactaagaatggaaaagccctccattccaatagaagagccaggtagcaatttctggttatggaaccagaagctctcaggcttcaaataaaacagcatcacttctactcttataaaactgtaaaaacaaaaacaaaaacaaaaccggatctacatctgtcctaaaaggcagagagtacttgagacctcatggatataaaaccagcttacaaactacattgcactatatgaagaaattatcactgggggcaaagcaccaagcagagagcacagtacacagtgtgtggatgttaatgttattccctagccttcccattcctttctcttggtcctttatgcatatggaacggttccattattaaactttgtaataataactgagaacctgactcccagcaagggagtcgttcagaagttgagggagttgaaatctgactgagtaaataaaacaattaaatcattagcttaacatttcatcaattaaaaataaaaatttaaaaacaaatacttaaaataatgtaacaatttatcatcaccaggcaatttggactcacgacagtgtatgctgttagacatgcagtgttgcaatgcagcttgactgtcttgcagacagcctcaatgctatttttaaattggcagaggcagcaggccatatggctaggtaagatcctatagatgaaaacacaaaacaataaattagtggtaaggcggttacttgagtaggtaaaggaggcagccaacgctaccacagggctgggcaaagaggtgttactgaggcctgtggactggacacttgggtaggaaccagaaggccaatgggaaggaggacacaggtgcccaactgaagggtaagcatggcagtgagtatggtatgcctagaataaaggtggttgggattagaattgggtgacactgatcagtagtttaaattcagaggtatctcttcccgactcaaaagtctcactttgggctgaaagtatacaggaagaaggtagacttctaagaagagtctgaataagcccccaacttctgaaggccctttctcaatttctgttgggagtgggaagtattagaaattactctgggcattaaaaatagctcagcttaacctggattgtggggttaaaaaaaataacggagattgcattggccaaatctggacaatttgagctttcaaaagaataacaacaataagctacaacataatatataaaaaatccatgaagaatgatattttaaaagagggggagttgttctttaatgaaataatgctagctaataaatgtagaaggaatgacagaattttaaaaagtgtcactttgcaaccaccaatgtaataaaaatagattcagacaaagattatcattgatgaacagttgggtgaaaagacatttgagaacaggatcttcactgatctcaaagtaccaccccacagattttttattaattaccaaagggaaaagttattttttatttttttatgagacaaggtctcactctgtcacctaggctgaagtacagtgacaaaatcatagctaactgcagcctcgaccccctgggctcaagtgaccctccaaattcagccccccaggtagatgggactataggcttgcaccaccaccccagctaattttagttttttgtttttgttatttttagtagagacagggtttcaccttgttgttcaggctggtctaaaactggactcaagtgatttgcccatctcggccttccaaagtgctgggattacaagtgtgagccaccacacccagcaaaataaccacagtggagagatctggaagatcaccttaaacaagtgatcaaacttagcattatgagccacctggggtcacgaggcaggaaagatacatcacctatgcagtattcttcccaaagatgcttaccttgaatctcatgtggaaacagagaaatccagattgtgggacaacttacaagacaactatctttgactcttaaaaaatgccaatgtcatgaaagatcaaaaaaagtagaggcatgttttagattaaaggaaatgaagacatgacatgcagtgcctgatctttgactggattctgtagtattctttcatctttctgcatgtttgaatttttttcaaaatataaatttgggcaaaagagataaccaagataattgattaatttattgttatggcttcttgggggcagtttcagagaaataaaaacaatctctgtaactggaataaattctcaaggttaatcttaagcagtatagcatggtcattaagaatacagattccacagccagactaggcttaaatcccagctctgtgaataatgtaaatttgggcaaattgcttaatctctgttccttggccttgtcattataatagtacctacctcaaatgagttttgaggattaaatgaatccctacctgaaaaatgtctggcacacactgagtgatcaataaatgttaactactataaatattacattacagaagttgtaggggggcctcttctgaatcctctaaaaggatgactttgttagggccacattaagactgtggaaacagaagagtattcaatggatacatgaagtctgtgagttgggggtatgatgtatagagttttagattaaaactgcatccaataagttggcctgataaatctttcaaacctacagaggaataatcacaagtgactcgtattcctttgggtccaatagaagcctctgatcttcatatagattgaatgtacccagaaccataacctagcattttacttatatagcaaccttaactctgacacaaagatgtttcttttgttttgaggctgagtctcgctctgttacacaggctgagtgcagtggtgcaatcttggctcactgcagcctttgtctcctgggctcaagtgatcctcccgcctcagcctcctgagtagctagaactacaggtgcgtgccaccacacctggctcatttttgtattttttgtagagatggggtttcaccacgttgcccaggctggtctcaaactcctgagctcaagcaaccccctctccttggcctcccaaagtgctgggattacaggcatgagcccaaaggttttgttattcttttcctgcccccaacttttgattttaaacattttctttttttcctttaaggtttaggatggctaggaagcattttcaaatggtataacgaacacctgtataacttgcatctggaatcaacagtagctaatactttgccacacttcctttccatgtgtgtatgtttatacattctctggacaaaccatttgagagtcagttgcagacataatgacccttcaccattaaagacttcagtgtgcagcccctaagaaccaatgcattctcctccataaccagaagactctcatcacccaatggaacttaatattatcattgcctactatgcattccatatacacattttcacaattgtcccaatcataacatggcttaaaaaattcagaatccaatcaaacatcagacattgcattttctgttcatgatttttttttttttttttttttgtagaaagacctttaatacttctgtttacaaaattcgggcatacatttcagtttgccctgaaccgtgcccaaggctgtgtgctcatctctgccagggtgtctgtgcccttcatgtactgccgaccacgagggtgcagagcagagcctggggtccggaggcttcgctgggcctcagggggaggggaatgtgaatgtggcccagcccagaggaccctccatttcgtcgattttggattgggcgacagaggaagcagatgtcggggctgcagacatgctggcctggacaggggtctggggaccccggggctgcctgccgtggtctagaggagatggctggggccacttcccacagggtgggttggcagcggctcggcaaggggaggcctggctaccaggggcttgaacatttgctcactggagcctttgtgcttggcccttagcagcacagctggggctgtggtcccgtgcgaggtgtgctgggggggtgtgtaggtggctggtggtggcagcttgtgccagagtgacacaggcttccgtgggcctggctgggggcagttaaaaagctgaaaaggtacttggtgtgtgagggtaaggcttgggaggcagggccctagaggaggccatgttctctgtcctggttgaggggagcagtatgggggggaaggtggggcagatcccagctggcctctgtctcctggttgcaagctgacagcaggccagggaaacagtgaggccctctgccctggccttggggagaaggagtgcatgtgtgaggctggggtactgtggccctggagtggggctagggttcatcgccaggagcaggcttgtggggggatttaaaaccagggtcctgtctctgagccaccccacagggacactcgatccaagcctgttaaggccgtggaactcgagggtaagctgtgggctgggcccccatggggtcaggatggaggtgggggctgccctggaggaatattagtgtttctgagagcaccttagtgttgccccgtctgggccagctgggtgaggagttggggagcgggaagaaggccggcgccatggagtgaggaagggagccgtcaccgttaggggtaagcgctagtgtaaacaagcgtccccacccaccccgataagcctcccacccaagtgtggctccctgctgagggagtacctcaagggcccgggcctgggtggcgccagaaggtttggacacacaattagccgggggtagtggcgggcacctttagtcccagctactcgggaggctgaggcaggagaatggcgttatcccagggggtggagcttgcagtgagcagagatcacgccactgcactccagcctgggcgacacagtgagactccatctcaaacaaaaaaaaaaaagagtgctttatagattctagatacaagtcttttcagggaccaggtacagtggctcatgcctataatcccagcacattgggaggctgaggcaggaggatttcttgaggccaggagttttagaccacctgggcaatatggtgaaaccttgtctctaccaaaaacataaaaattaggcaggtgcggtggtgctcacctgtggtcccagctacacgggaagctgaggtgggaggattgcttgagcctgggaggtcgaggctgcagtgagctgtgatcgccactgcactccagcctgggtcacagagtgagatactatctcaaaaagtaaataagtaaataaattaaaaacaaaaaacaaggccttatagatatgtgtttggtaaatatcttctctcaggttgtggtttgtcttttcattctgttaaaagtgttctctggctgggcatagtgactcacacctgtaatcatagcactttgggaggccgaggcaggtggatcacttcaagtcaggagttcgagaccatcctggccaacgtggcaaaaccccaatctctactaaaaatacacaaattagccagttgtggaggcccatgcctgtaatcccagctactcaggaggctgaggcacaagaagtgcttgaacctgggaggtggaggttgcaatgagccaagattgcaccactgcaccccagcctgggcaacagagtgagactctgtctcaaaaaaataaagaaagaaagaaaataaataagtaaagttttgtgaagagcagaagtttttaattttgatcagctttaagttagcaattttttcttatatggcttgtgcttttttgtttcttacctaagaaatctttaagaacctgttgtttaatccaaagtggaaaagatttactctctatgtcttctcccagaaattgtatagtgacatttagatctatgatccattttgagttaatttgcatatatggtgtgaggtttattgtttctttgtttttttgcaattttatttttattttttggagaaatgaggtctcactgtgttgtccaggctggtttcgaactcctggcctcaagtgatcctccggcctcgttctcccagagtgctgcaattatagacatgaggcatcatgcctggccttctttgtagatataggtatagatatatatctatctatatctatatatatcttcaccaggtgtgatggcacattcctgtagtccccgctattagggaggctgaggcgggggtatcgcttgaacccaggaggtagaggttgcagtgagccaagatgacaccactgcactccagcctgggtgacagagcaagaccctgcctaaaaaaaaatatatatatatatatatatatatatatttatatatatatacacatatatatttatacatatatatgtatatattatatatctttatatatatttctatatatattttatatatttatattatatatatattttatatattttatatatattatatattatatatatatattttatatatatatatatatttctgcagggccctattgtgagtttgttacacaacttactgcaacttaaattgtgccaccacacccccccccacaatatggcaagctaaatagaaactcagttatgctaaggctggttgagggcattatgcaagattagcatggaaagggccctctatttggcactctgctccgttcatttttgtcaggtcacttttttatcttcaccaggttgtcagatctgttttactgctctagcctcactttcctcagcctcctgcagcatcttccctgtaagctacatcccttcctctctggatgaagtcctcttcatcgaccaactttctcacttagttctctaagatagtgaggatctgtctgcttttttcttgaccattagtggataggaaaaaaatgctctgattgtctgtaaccatttgtcaccaaggccataaagacgttgaactaatttccttattggagttcattattggaattcttgaggagtttacacatttatatacaaagtaagtaggccagctcatttgtcttggctcatgtgtaatgatctttaacgcgtattgaaaaattactattctcaagtaaggataatgtatatctcaggtcacttacagtctcaaagttttgtcagtatactttaaaacaatcctgcgaacagatctagattgaaggagactaaagaatcatgaactcgaggcggtgccggggcaggcgcagagctggcaagcacgtggtggggcccctgaggtgtgcagagggtcgcgcacctagaagcctgtcgctggcgcggtctgggcgggaggttctgcggcgggaggcagcctgttggttgcagggctgaaaaagcagttctacaaggcaagccagctggtcagtgagaaggtcggagggtctgaggggaccaagctggacaatgacttcaaagagatggagatgtcatcagcaaggcggtgatggaaatgctggcaaggaccatcaagtacctggagcccaacccagcctcacaggctaagctgaccatgctcaacacagtgtgaaagatccagggccaggtgaagaaccccggctacccgcagtcggaggggctcctgagcgagtgcctgatccgccaccagaaggagctgggcaacgagtccaacttcagtgatgcactgctggatgccggcgagtccatgaagcacctggcagaggtgaaggactccctggacatagaggtcaagcagaacttcattgacctcctccagaacctgtgtgagaaagacctgaaggggatccagcaccacctgcagaagctagagggccgccgcctggactttgactaaaagaagcggcagggcaagatccccgatgaggagctgcgccaggcgctggagaagtttgaggactccaaggaggtagcagaaaccagcatgcacaacctcctggagaccgacattgagcagatgagtcaactccgggccctggcggaggcgcagctgaacgaccactggcaggccatgcagatcctggacgagctggcagagaagctcaagcgcaggatgcgggaagcttcctcacgccccaagcgggagtataagcccaagttctgggagccctttgacctcggagagcctgagcagtccaacgggggcttcccctgcaccacagtccccaagatcgcagcttcatcccctttccaatcttccaacaagtccatctgtactcctagcaggagcatgccgcccctagaccagccaagctgcaaggtgctgtatgacttccagcctgagaaccatggggagctgggcttccatgagggcgacgtcttcacgctcatcaaccagatcaacgagaactggtaccagggcatgctggacggccagttgggcttcttcctgctcagctacatggacgtgctcatgcctctgcccagtgactcactggtgcccccgccccacccctccatccacactgggtggcaccccctgccaggtctcctgccttccatgggctcctgctgccagggcggtgtccaagccttctggcgccacccaggcccgggcccttgaggtactccctcagcagggagccacacttgggtgggaggcttatcggggtgggtggggacgcttgtttacactagcgcttacccctaacggtgacggctcccttcctcactccatggcgccggccttcttcccgctccccaactcctcacccagctggcccagacggggcaacactaaggtgctctcagaaacactaatattcctccagggcagcccccacctccatcctgaccccatgggggcccagcccacagcttaccctcgagttccacggccttaacaggcttggatcgagtgtccctgtggggtggctcagagacaggaccctggttttaaatccccccacaagcctgctcctggcgatgaaccctagccccactccagggccacagtaccccagcctcacacatgcactccttctccccaaggccagggcagagggcctcactgtttccctggcctgctgtcagcttgcaaccaggagacagaggccagctgggatctgccccaccttcccccccatactgctcccctcaaccaggacagagaacatggcctcctctagggccctgcctcccaagccttaccctcacacaccaagtaccttttcagctttttaactgcccccagccaggcccacggaagcctgtgtcactctggcacaagctgccaccaccagccacctacacacccccccagcacacctcgcacgggaccacagccccagctgtgctgctaagggccaagcacaaaggctccagtgagcaaatgttcaagcccctggtagccaggcctccccttgccgagccgctgccaacccaccctgtgggaagtggccccagccatctcctctagaccacggcaggcagccccggggtccccagacccctgtccaggccagcatgtctgcagccccgacatctgcttcctctgtcgcccaatccaaaatcgacgaaatggagggtcctctgggctgggccacattcacattcccctccccctgaggcccagcgaagcctccggaccccaggctctgctctgcaccctcgtggtcggcagtacatgaagggcacagacaccctggcagagatgagcacacagccttgggcacggttcagggcaaactgaaatgtatgcccgaattttgtaaacagaagtattaaaggtctttctacaaaaaaaaaaaaaaaaaaaaatcatgaacagaaaatgcaatgtctgatgtttgattggattctgaattttttaagccatgttatgattgggacaattgtgaaaatgtgtatatggaatgcatagtaggcaatgataatattaagttccattgggtgatgagagtcttctggttatggaggagaatgcattggttcttaggggctgcacactgaagtctttaatggtgaagggtcattatgtctgcaactgactctcaaatggtttgtccagagaatgtataaacatacacacatggaaaggaagtgtggcaaagtattagctactgttgattccagatgcaagttatacaggtgttcgttataccatttgaaaatgcttcctagccatcctaaaccttaaaggaaaaaaagaaaatgtttaaaatcaaaagttgggggcaggaaaagaataacaaaacctttgggctcatgcctgtaatcccagcactttgggaggccaaggagagggggttgcttgagctcaggagtttgagaccagcctgggcaacgtggtgaaaccccatctctacaaaaaatacaaaaatgagccaggtgtggtggcacgcacctgtagttctagctactcaggaggctgaggcgggaggatcacttgagcccaggagacaaaggctgcagtgagccaagattgcaccactgcactcagcctgtgtaacagagcgagactcagcctcaaaacaaaagaaacatctttgtgtcagagttaaggttgctatataagtaaaatgctaggttatggttctgggtacattcaatctatatgaagatcagaggcttctattggacccaaaggaatacgagtcacttgtgattattcctctgtaggtttgaaagatttatcaggccaacttattggatgcagttttaatctaaaactctatacatcatacccccaactcacagacttcatgtatccattgaatactcttctgtttccacagtcttaatgtggccctaacaaagtcatccttttagaggattcagaagaggcccccctacaacttctgtaatgtaatatttatagtagttaacatttattgatcactcagtgtgtgccagacatttttcaggtagggattcatttaatcctcaaaactcatttgaggtaggtactattataatgacaaggccaaggaacagagattaagcaatttgcccaaatttacattattcacagagctgggatttaagcctagtctggctgtggaatctgtattcttaatgaccatgctatactgcttaagattaaccttgagaatttattccagttacagagattgtttttatttctctgaaactgcccccaagaagccataacaataaattaatcaattatcttggttatctcttttgcccaaatttatattttgaaaaaaattcaaacatgcagaaagatgaaagaatactacagaatccagtcaaagatcaggcactgcatgtcatgtcttcatttcctttaatctaaaacatgcctctactttttttgatctttcatgacattggcattttttaagagtcaaagatagttgtcttgtaagttgtcccacaatctggatttctctgtttccacatgagattcaaggtaagcatctttgggaagaatactgcataggtgatgtatctttcctgcctcgtgaccccaggtggctcataatgctaagtttgatcacttgtttaaggtgatcttccagatctctccactgtggttattttgctgggtgtggtggctcacacttgtaatcccagcactttggaaggccgagatgggcaaatcacttgagtccagttttagaccagcctgaacaacaaggtgaaaccctgtctctactaaaaataacaaaaacaaaaaactaaaattagctggggtggtggtgcaagcctatagtcccatctacctggggggctgaatttggagggtcacttgagcccagggggtcgaggctgcagttagctatgattttgtcactgtacttcagcctaggtgacagagtgagaccttgtctcataaaaaaataaaaaataacttttccctttggtaattaataaaaaatctgtggggtggtactttgagatcagtgaagatcctgttctcaaatgtcttttcacccaactgttcatcaatgataatctttgtctgaatctatttttattacattggtggttgcaaagtgacactttttaaaattctgtcattccttctacatttattagctagcattatttcattaaagaacaactccccctcttttaaaatatcattcttcatggattttttatatattatgttgtagcttattgttgttattcttttgaaagctcaaattgtccagatttggccaatgcaatctccgttattttttttaaccccacaatccaggttaagctgagctatttttaatgcccagagtaatttctaatacttcccactcccaacagaaattgagaaagggccttcagaagttgggggcttattcagactcttcttagaagtctaccttcttcctgtatactttcagcccaaagtgagacttttgagtcgggaagagatacctctgaatttaaactactgatcagtgtcacccaattctaatcccaaccacctttattctaggcataccatactcactgccatgcttacccttcagttgggcacctgtgtcctccttcccattggccttctggttcctacccaagtgtccagtccacaggcctcagtaacacctctttgcccagccctgtggtagcgttggctgcctcctttacctactcaagtaaccgccttaccactaatttattgttttgtgttttcatctataggatcttacctagccatatggcctgctgcctctgccaatttaaaaatagcattgaggctgtctgcaagacagtcaagctgcattgcaacactgcatgtctaacagcatacactgtcgtgagtccaaattgcctggtgatgataaattgttacattattttaagtatttgtttttaaatttttatttttaattgatgaaatgttaagctaatgatttaattgttttatttactcagtcagatttcaactccctcaacttctgaacgactcccttgctgggagtcaggttctcagttattattacaaagtttaataatggaaccgttccatatgcataaaggaccaagagaaaggaatgggaaggctagggaataacattaacatccacacactgtgtactgtgctctctgcttggtgctttgcccccagtgataatttcttcatatagtgcaatgtagtttgtaagctggttttatatccatgaggtctcaagtactctctgccttttaggacagatgtagatccggttttgtttttgtttttgtttttacagttttataagagtagaagtgatgctgttttatttgaagcctgagagcttctggttccataaccagaaattgctacctggctcttctattggaatggagggcttttccattcttagtccatccaactctgaacttgctctgaatctcaaacctttctattcgcagaacaaatgctcaaatgctttcaagagtttttctgtagattaggtttattagcaccaacttcatgacttctaaaatgtgactgcttgaatacaggtatctaccagtgatatggggtggataattaataatgcttggctacctctataaagacagtgttgcttatttttcagaactttttttttttcttttcttgttttttttttttaccaattatattcttcccttctccccaagaggcgggcagaaaagcattgttaatctccttttacaggtgaggaaaaacaagatcagaggtgctaagtgctgtagcctagtgccaggtcttctgtccccaattctgggttctccccaagcccatgtttctcctttctcgcaatctttactacttccgctgaccttcagcaccacccaaaatacttttaattctggaaaagaagcccagctgcacactggcacacttgaccttcatgcagtcagaagctttggatggttccccatccaaaatattagagatgaatgaaagtgaagtaggcatctgacaaaagtcactttttcccttctgcatttaggacctcaagtaatgtttatccagaaactgctaccataccatagattcattgtatatttaacaacataggcatacaatctggcaaattaaaaatctcctaacctacaccctggatccctgcccaaatttaagaaaagaactaaggtggacacagtgtttttttccatgtcgcatcttctgtgatggggctatgatatgtgggagcagagaatggggtgggtgggtggagcacatgccagatgaggatctatcagcaatgggagggggcatccctccctgctcctttagcatctccaccctgctcctctcagaggaccgcctttcattgcattcagctgcgatggtagcaagaacacgggcacactgaggatgaggagagtgggagccttgtgctctctctgcatatgaggcaggacagcacagggtatggagcagtctgcagagaggccagttcatcagctcatcagggaagcacttgtcttccaccttgggctttgactgagcactgggcaattggcccctggggatcaacggaataatcctaagcagagttactctatgtcacactatggaatgttccaagtaggtggccatgttttcaaaagatgtcttttcctcctttcgttgttgccgtttcataggtttaggtttgggtgtatgtttctcctctctgaatggcactcgaatgtttgctgactcttactctgtgtgactggggcatacagctatggactgagtatgaaagatgatcaaagatatttcatgatcaaagcagtctcttcttttctgacagctgaagaagcatctgtagggaatccagaaggagcattcatgaagatgttacaagcccggaagcagcacatgagcactgagctgactattgagtcggaggcgccctcagacagcagtggcatcaacttgtcaggctttgggagtgagcagctagacaccaatgacgagagtgatgttagcagcgcactaagttacatcttgccttatctctcactgagaaatctaggtgcagaatcaatattgttaccgttcactgaacagctattttcaaatgtacaagatggagataggctcctgagtattttgaaaaacaatagaaagagcccctcacagtccagccttctaggtaacaaatttaaaaacaaaatatttgaaaaaaaaattagaaactgcgcaaccacaggaaaaccgcctggcaaagattcaaagtgtaggcaaaaacctgcagagagtgaacagagtcctcatgggcccaaggagcatccaggaaaggcacttcaaaaaggtgggaaagcacagcactaggaaagaacaggatgcccaggcatttgtggacaatgctgccaaaggaaaaaggcttgagggtccagccccaagggagctggaacagcctcacatagtgcaggggcctgagaaggtagtgggaaacaccatctacaccaagccttcattcacccaagagcataaggcagcagtctcctctgtgctgaaacccttctccatgggcgtgccttctgcctctagccctgcaaaagccctacctcaggtcagagacagatcgaaagacttagcctacaccattttaattttagaaatggcaatggctagagtgaaaaacatgaaggctgctaaaccaatcacacattccagaaaaaaatagcgcttttataaaactcactccattgtggcccacagaacacccaaggccaaaaagattagaaagtttagaaagggcagttatctcaacagaccgatgctcgcaaagaggccgctgttctctgcagcaaagagcctcatacattcgcaagggattttttcatccttaggagacctgagtcctcaagaaaaccctcttctggaagtagttgctccttcagaacgttttacagaaaacactaatgtaaaagacacaactaatgtaaaagacacaaaagagatgtgttcaaagacacatctctgaaaacacaaactacaatcatcctcctgaggcagtttccgctgggactgcattcaacttagaaccaactgttaaacaaactgagacaaaatgggaatacaacaatgtgggcattgacttgtcccctgagcccaaaagcttcaattacccattgctctcgtccccaggtgatcagcttgaaattcagctaaccgagcagctacggtccctcatccccaacgaggatgtgagaaagttcatgtctcatgttatctggaccttgaaaatggaatgttcagaaacacatgtgcaagggagctgtgccaagctcatgtcgcgaacaggcctcctgatgaagcttctcagcgagcagcaggaagcaaaggcattgaatgtagaatgggatacggaccaacaaaaaacaaattatattaatgagaacatggaacagaatgaacagaaagagcagaagtcaagtgaggtgaggagcacacagaaacatgagacccagatttcccatcatttagcatatgccaggaaagtgcccacataggagaacctgggactcccaggccatagcttgtcttggccatgtaactttggccatgacagtgatctcccactttgctcatgtagacagtgaaatagattagggcacaagatgaactgtaggccaggggtggtagctcatgcctgtaatcccagcactttgggaggccgaggtgggtggatcacttgaggtcaggagtttaagaccagctcggccaacgtagtgaaaccccgtcttcacaaaaaatacaaaaattagctgcgtgtggtgacacgtgcctgtagtcccagctactcaggaggctgaggtgggaggatcacctgagcccagggaggtcgagtcagtagtgaactgtgatcgcaccactgtactcccgcctgggtgacagagtgagatcctgtctcaaaaaaaataaaaagaacaaaagaacctgtaagctactcaactggaatactggggttttgaaaagttagcttccattctctctctctttttaattgttctttcttttttcttttttttttttttttttagctcatgaaagaagttccaggatatgactataagaacaaactcatcttcgcaatatctgtgactgtcatactaataattttgattataattttttgttttatagaggtaaagacaataattaattcaggttttcaaaatacaatcctgtgtttgtgtggattcagaatccacaaactgaaaaccaacgtcactttcccacttgacattcttcttctgtcatttaaggctgaggtgtgctttgttcttttactgcaatgtatattccaggattgttaaaggatcctcgcttccaggaggtctctgtgaaataaaaccaagttaatcccactagactattttaagaagttaagttgatataatagcaaaatttctcccacccaaaactatgtcaacaattggatgtactcactgagtcaccccttactctgccactaatttatttccttgttgcttaaatgatgagagacatataatctccaccctcacggagttgtcatcaccctggagaggaagaagacagccaaaagagagaagtattgtcttgtagacttactagattcacatagtatcatccttctccagtgtgtaaggtgttgtctaaataggtccagttaaagaactacagggtagccatttttaaaaaaaaattttggccacgttttcaaattcacaggggagggggaatgtctcatactccagccctcctgagcctaggccctctgtgagatgtgtcaccatttcttggacaccatatgagacattccccctcggattagagatgctcaacctgcatcaacaaatctaaagcctgcatctggctaccctggggcgagtcctgtttacagtgcctattcctggagctcgcctctttttgccttttgtttgattatgtgatgtattacttttcccagcaggccagtgctagcatactggaagagggatttaataagctggcacccttgatgctatgctcctaatccaaccttatttgcctcattggccatttccattatggtggcagccctccattccagccacagcagcccctcagcgtcccccagtcacactgtccccattgctgctcatctgtgcctttgtccatctacaatgcccttatttcactctgcctgtgggagtcctgtgaatctctccaaagccaactcagttcatctttctgcttgaaaccttccctgaataggccaggtgcggtggctcacgcctgtaatcccagcactttgggaggccaaggcaggcggatcacaaggtcaggagatcgagaccatcctggctaacacagaccattctctactaaaaatgcaaaaaattagctgggtgtggtggcgggcgtgtgtcgtcccagctacttgtgaggctgaagcaggaaaatggcatgaacctgggaggtggagcatgcagccagccaagatcgggccgctgcactccagcctgggggacagagcgagactctgcctcaaaaaaaaaaaaaaaaagaaacttccctgaatattccagccctcctgagcctagtccctttgtgagatttgtccccatttcttggacaccatataagagacttcagaggctgaagtgggaggattgcttgagcctgggaggtcgaggatgcagtgagctgtggtcataccactgcactctagcctgggcaacagagcgagaccttgtctcaaaaacagccaccaccaaaaactatcttgggatttgaataggattaccttaaatttgtagattaatttgagaattgacatctgtacgacattctagaacatggtatttcatgtcatgtattcatttcttgttaatgtctttcagaagagttttagggtttccatcatatagatcttacacgtcttttgttagataacagatctttgtatttttgttcctaaatacttcagacatttgtattgccattgtaaatgggatctttcttccattttctagttagttattggtggtacatctgaaaagcatttgaggtttgtgtgctgctctcttgattttgtttctagccaccgtactgaattctcatattacttccagtaaaatcttagttgattctcttaggcttctttggctaacatttattattttatatgcaaataattatagttttgtctcttccttttcaatacttacactctttccttcctttcctttcttttttttttctttctcagggccttgttgtcacccagactggagagcaatggtgtgatctagctcactgtaacctcaaactcctgggcttaagggatcctcctgcctcagcttcctgagtggctgggactacaggcaggcagtgaattttaaaacttttggtgtagagacaagatcttgctatgttgcccaggctggttttcctgccactttagagcaggtttcctttttttcatacttttaagaggtttttattaggaattgtccattgaatgttagctaaaacagtcaataaaatgcgttaagtaccagctacatgcaagaccctaagttagatacagtcagccctcttcatcagcaggtccacatcttcagattcaactagataaggctgaatatttgaagaaaaaaacaataaaaatacaattagaaagtacagtataacaactgttgccatgatacaatatctatacattttattagtgatgacctaaagttcatgggaccaggcacggtgactcacacttgtaatcccaacactttgggaggccaacctgggcagcatagtgagaccttgtctttaataaaaataaaaataaaaaaattagctagtgtggtggtatgcacctgtagtcccagctactcaagaggctgaggtgggcagatcactggagcccaggaggttgcggctgctgtgagctgtgattgtgacactgctctccagcctgagtgacagagggtgatcctgtctctaagtaagtaaataaataaagtatatgggggggatgtgtgttggttatatgcaaacactgcaccattatacgtaagggattgagcatccacagattctggtatggtgtggaggcgatatcctagaaccagtcgtctgcaaggtagcaaggatgactgaactgtggaagaatcaaagcactgttaaacagcatacaattcctgtcttcaaaaaagttatctcatcgggtagatgagacttaaaatgaataaaaggaatgaatacacattggagatagtggttgttgtgatagataaccttaattgtgttttcttccaaaacgggtgaattcacataaaagggcatcagaaaaatacaaagacaacccatcaatatcaggagcctgagcatgagttaaagcatgtggatggcctagagccatgtttttaaaattgttattaaatattggttttttacttaaatcaatgaaaactttctttactttgtggttgtgttcctcaaaatgagaatttttaacaataataaaaataaagcttattagatcatttttaatggtaataaattggttactgaagatttgactaaagagaaaactaggccaatctaagtagagtccaaatgaagtagaaagtccatagagaacaggcaaaaaggaagttgtggaaccacagacagtaaaaggaaaaaattggcggggcgcaatggctcatacctgtaatcccagcactttgggaggctgaggtgggtggatcgcttgagcccagttcaggcaacatgacaaaacccccacctctacaaaaaaaatagtcaacatgacaaaacccccaatgtctacaaaaaaatacacaaaacatatgagccaggggtggtggtgtgcacttgtagtcctagctacttggtaggctgaggtgggagtatcgcttgaacctgggaggtggaggttgcagtaagctgaggttgagctgttataccccaacctgggtgacagttgaaagagtgagaccctgtctttaaaaaaaaaaaaaaaaggaagaaagcaaagaaaaaaaaatttatttttgtgacaagttctctttctgtctcccaagctggagtgcaatggcataatcatagcccactgcagcctcaaactcctgggctcaaggcatcctcctgccataaaggcctcccaaagtgttgggattacaggcataagccactgtgaggctagattttttttttttttttttttttaagcaaggtttggctctgtcacccaggctggagtgcagtggtgcaatcttggctcactgcaacctctgcctcccaggctcaagtgatcctcctgcctcagcttctcaagtaggtggaactacaggcacgtgccaccaagcctggctaatttttgtattttttgtaaagaaggggtcttgatacgttgcccaggctggtcttaaattcctgggttacagtgatccacccacctcagcctcccaaagtgctgggattacaggtgtgagtcaccacgactggccaaaaaaagttaagtgttaaaatcaaaaagaaaattcaccaagccattttgcatatttttctggaaagatacagatacatatatatacatatatatagagagagagagagaaagagagagagatctggactggacaccctatactatcagttgggtacaactttgtttcagaaaggacaaagggaactgattagagttaaggcacatatatgtgtgtgtgtgtgtgtgtgtattttcccaattcctcataccactcctttttattaatttttattgagatataagttatacaccataaattcacccttttaaataagtgcagaatttagtgggttttagtatagtattcacaaggctgtacagccatcaccactatttaattccagaacattttcatcaccccagaaagaagccccagaatcactggccctgctccccatttcctctcctatttcctggcaagtatttacttcctatgaatttgcccatttgggacatttcatataaatcatacaatacatgatttcactaaataagacttttgtgtgtggcttcaaacaatttttaaaaattgaggtaaagtaggcataatataacatttacagtctaaccactgccccctctccccacctattttttgagacagggtctcactctgtcttcctggctggagtgcagtggtgtgatcatgactcactgcaacctcagcctccccggggctcaggtgatcctcccacctcagtctcgcaagtaactggcaccacaggcacacaccaccaaacctggccaatttttgcattgtagagacaggatttcgctatgttgcccaggctggtcttgaactcctggactcaagtgatcctcccacctcagcctcccaaagtgctggtattaccggcatgagctaccacacctggctgtctctaaccagttttaagtgtacaattcagtagtgttaagtatattcacactgttgtaaaacaaatttccagaactttttcatcttcccaaattgaaactctgtacctattaaacactaattccccattctctcctcccagcccatggtaaccacccttctactttctgtctttatgaatctgaccactctaagtacctcatatgagaggaatcacacagtatttgtcctttggtgactggcttatttcacttagcataatgccctcaagggttctccatgttgtaacatgcgtcagaaattcattcaaggctgaataatatatccgttatatagatcaatcacatttgagttatccattcatcagttaatgcacatgtaggttatttccaccttttggtcattgagaataatgctgctgtatacatacgtgtatgcgtttctgcatgactatttgtttgcaattcttttgactatgtatgtctcggctcactgcaacctccgcttcccgggttcaagcgattctcctgcctcagcctctcgagtagctgggattagaggcacctgccaccacacccggctaatctttgtattattagtagagacggggtttcaccatgttggccaggctggtctcaaactcctgacctcaggtgatccacccacctcagcctcccaaagtgctgggattagaagtatgagccaccacacctggccatgaatttggtccagtgtctgaacttcacctctagagtcccttccagcctcctacctcactcccaccttggcctcctgagtagctgggacaacaggcttgcgccaccattaaccagctcattaaaaaaaagtttttttctttgtaaatatggggtctccccatgtttcccagactccaaacctatttcctaacctttatcattatctgcttctgtgggatgtgaatggaagcgaggtgtgctacattcaggcttttaacacctcccacctgcaccttctaattcttcctttgcatcttctggctggacaaagagggtcttgtggggcctctgagtcactggaagaaggtgaagccacaatatagctggagtctggttcccaggtgcagcagtgtgatgtgagtgagaaagtagcctttagtgcattaagccactgggatctacaggttgctcgtagatcaaccacgtctacagacgtgggggcaccaccatgctcagctaatttgttatatgtttatgtagagatggggtcttgctatgttgcccaggctggtctcaaacttctgggcttatgtgatcctcccatctcagcctcccaagtagctgggactgcaggctcatgctaccatacccagctaatttttaatatttttttctgtagagatggagtcttgctatattgcccaggccagtctcgaactcttgggctcaagcaatcctcccgtctcagcctcccaaagtgctgggattataggtgcgagccaccacgcccaaccagttgcttaattcttacaacagccctcggaggtaggttccattgttagccccaatcttatttatttagatggagtctcactctgttgtccaggctggagtgcagtggcatgatcccagctcactgcaaccttcgcctcctgggttcaagtgattctcttgcctctgcctcctgagtagctgggataacaggcacaggccaccatgactggctcatttttttttttttttttttgtatttttagtaaagacagggtttcatcacgttggccaggttgattttgaattcctgacctcaaatgatctgcccacctcggcctcccatagccccaatctttaaatgaggaaattgaggtgcagagagggtcggccacttgccaaatgggaaaagctagaattctaacccagaccatttgccttcaaaacctaccctgaccaccacagtaacctgtgataaggtgcaactcagagtaaataacctcctctctgggccctgatgtctctctacctacaatggatttcctgttcctgtgtggggagggaggtgcaacaccagcccccgagctttgagccttgcctcgtcctccctgtatattaaggagtgctcagatgtggctgtagctgcacctctttctccaagatggagcccacccagagatgctgtgtgcaaaaggcttgactcatagccggcgcataatatgccttcaataaatgtttgaaattattattctcgatggtgtcacggtgctggctgaaaggcagcatagctcagcagttaagccagacggtccgggttcaaatcccatctctaccatgtaatagctgtgtgaccttgggtaagttactcaacctctctgttcccccatctataaaatgggggaaatgacactatctattttatagagctattgcaaggattagcatagaaaatgcctcaaccgtgcctgccactgatgtcaggttttattattgctgtaacactttcccctattcagagtttcatctcctagatccccgggcacggcaacagctggctttcagatcagggcctccctgggaggttttagtctcagcacaagtcacctgccttccccctctctggctcccagcagccccatccttcccccagtcttggcccgggttccagcaccgtctcctcccctcccctttgcccctcagccccagggtgaccaaagcctctgcctcgtgggacggctttctagcactttcctccttttaagagattgactgcaatttctatagtaacatcacattagccagaaattaatgtcctcattaagatagcaattaggcacattagcgtggcaataaaagagaagcttatgaaataactgctggttccaaaatgccttttaatttagtattttatattgtgccatgttattaatttttttccctcggcagaagataataagagaaatgtttgaattgtggggaggtttaaaataaaaaaaatttttgagaaggaaagcaatgttgatacctgtagacagacgatctgtcttctccccaaaaccccattggtcctgagtccatagggtgactccatggggtgtcagaagagggacagcattgatgggtagggggccaggccatgtcctgggacttttggccaggcttggcatccagcggagattggagtggaacagcctttgatcctagaagcaggagaaatggtgccatgtttctttgccctaaacaacgaatacctgttggtttgggattttcccccaataggctccatctcctgaattcaaattctttcagcaaatgtttccttggtaccctgtggctctgactctgctgttgagggctttccagattgttggagacgacagatgtataaatgggaaaatgccatgataaactgggaatgcagtattttgcaacttgtaatgaaatcatggctctaggccgggcaccgcggctcacgcctgtaatcccagaactttgggagggcaaggtgggaggatcgcttgaggccaggagttcgagatcagtctgggaaacataatgagacccccccgcaaccccgtctcttaaagaaaaagaaaagaaagaaagaaatcatggatctaggacatgattagccatggatagtaaaatcattaggggaaaggtggatgaggaatggttttgtgtggccaggcacagtggctcacacctgtaattccagcactttgggaggctcaggcaggcggatcacccgaggtcaagagttcgagactagcctggccaacatggtgaaaccccatctctactaaaaatacaaaaattagcccgctgtggtggcaggtgcctgtaattccaactactcgagaggctgaggcaggagaattgctggaacctgggaggcaggggttgcagtgagtcaagatcgcgccactgcactccagcctgggtgacagaacaagactctgtctcaaaaaaaaaaaaaaaaaaagaaaaaaaagaaaagaaaaaaaagaaaaggaaaaaaaggaatgttttaggggaggcctgttctgctcccatctgagccctgggtcaaatttagcgtcctaggctggacatgatgtggctcccattgggagcagtagtagtaggttggtgagggcctggaaggagacgtatctccctgagttaaggagggcacctcaaaggatcaggcacatgaacagagacctgaaggaggaaaagcggaggatacacatagagatctgggggaagaaggttccagacaggaggaacagcgggtgccaagactctggggtgggaactagcatggagaagtagagatcagctaggaggctgatgtggctggacggaagtgagagagagaggagaggaggtgcaatgagagatataccaaggaaagaaaacatggggcgctgggcacggtggctcacgcttgtaatcccagcactttgggaggccaaggcgggcggatcacccgaggtcaggagttagagaccagcccggccaacacggtggaacaccgtctctattaaaaatacaaaaattagtgggtcatggtggtacatgtaatcccagctactcgggaggctgaggcaggagaaacgcttgagcctgggaggcagaggctgcagtgagccgagatcgcgccactgcaatccagcctgggcaacaaagcgagactccgtctcaaaaaaaaaaaaaaagaaagaaaaaagaaagaaagaaagaaaaaggaaaaatggggaatttcattggaaggccatgccaaaacacaaacaaaaaagaaacaaataaaggaaaaatggggaaggattcctcaggaagttaaagagttgacaatcaatttcagggaccccgggatttgagtctagctccttcgtgggcaaggggacgtgctgaccaatgcacacctgtgcctgccaggctccttgtcagttacctgttgccagttaagctgtctaacaaaggccaggcacagtggctcatgcctgtaatcccagcactttgagaggccaggcaggtggatcacttgaggccacaagtttgagaccaacctggccaacatggcaaaacctcgtctctactaaaaatacaaaaattagtcagtcgtggtggcgggtgtctgtaatcccacctactcgggaggccgaggcaggagaatcgcttgaacccgggagggaggcagaggttgcagtgagccaagattgcaccactgcattccagcctgggccacaaagtgagactgagacaaaaaaaaaaaaaaaaaaaaaaaaaaagctgcctaacaacgcccaaatccagcagcttaggacaatcagcattaattttggcttcgcaggctacagggcagtttttctgctcctggctgggctcacccaccagcgtctatgggtccaagagtcacactgtatttattcaggctgggtcttttcgtatatttgggcccggctggctataggctggtctaggacaacaggattcttccctcatcctccagcaggctagctcgggcttggtcacctgacaggggcagggtttccagacgtcgaccagaaagatgcaccacctcttcaggcctagattgggaagtgacttcacttctgctgcaatccattgattggccaaaggagatcacgagaccaacccagattcaaggggtgtggaagtaggctccacctcccagtgggaggagctacctaggcaaagagtatagatggtgggcggtagaattgggtccgtgaagccaacttgaccagccccatgattcctttggggcttttgataatcattccctgcccctccctgggtaccccaaggcattctatggtcctcgaccctagctttggcccctgtagaagttctttttttttgagacggagtctcgctttgtcacccaggctggagtgcagtggcgcgatctcggctcactgcaagctcctcctcccgggttcacgccattctcctgcctcagtctcccgaacacctgggactacaggcgcccgccaccaagcccggctaattttttgtatttttagtagagacggggtttcactgcgttagccaggatggtctcgatctcctgtcctcgtgatccgcccgtctcggtctcccaaagtgctggattacaggcatgagccaccgcgcccggccctctgtagaagttctttctgcccaggtttgctctctctctaagctcccacaggagctgtggcttgggttgttcaaggccccaaattcccgactggacttcctttcttcagctctgcattggggtgtgaccaggactgaagtattttattgaaatcattggctctcctgatagcaaacagagagttggtgtcagtaaggcagaggagagtttagtctgtagtgtgctatggagtaagggagcaatggaaatcgggagcttagtttgaacacactcagtgtccccttgtgcagtgtccaacctgcccaaccgtaccagcccaccctgattgagggactaaagagtggaggaaaggaaggggaaagggatttcactgacagctggagccttagccctcgggccaaatgaaggaccttcccagaacagagtgacccagaaggaagctgtggcccaaccaccaagatgggtaaccctgacaggcacaacctgccctcttgtcaatcaaggctggaccacgtggtgtggggaaggggtgaaggactaagagagggggcaaagaggagggtaggaaggtcctggcctaaacgacccagttagtttccccatcaccccctacccccatcctgtatcccagggaagtatagtgcagctgggttcttggttgccatggcgactgacaaaaaaaaagacttgaggggaggaaaacaccccggggcatgaagaagcaatttgctctcaggtctgggagtcagcaccggaatcagaatgtcctaagaaggaaagaaaactgagcgagccgggcttgggtaggtggcaaaccttcccaaggccccctgccagccatcctaagagagagagggtaggggcgaccccagctctgtgtgggaggcgccaactctaagcccccacccccgaggctgcccctcccacccgaagcgtttagcacccagggtctggggtggggggcgaggcgggggcggggcttcccaacggattgcttttttttttttttttttttttttttttttttttcttaatttccagttccgccttgggacgagtccctggctgggggaaccgcatcaggcctgacacccatcccattcccccctaaacccagaacgagatccaacctcactccccagccccttcccgacctcgccgctcaggctgtgatgggaaggtccctgggagtggggaggagggcaaatttaaacccggaggggatcctgtagcccagttctcctcggttccctaaacctccaggaaagcggagaaagtcacattgtggtggcagcagcgggttttttttttaatctgttaataaaacgcaagtgaatcaaatccgccctaagggaatttggggggcgcggcgaggcagaggccatggtgtttgcagaagttggaaatttaataagaaggaaaaataaaaatagccactgtgctggagagagagagagagagaaggttgggagaagcaggcaagtgtgggactcctagctgggtggaaacgtgcagagggggctggggaaggcgagggcaccactagtccggaggagcaagggagacactgctggggataccaggaggggagtctttggggtgtcaccagaacagtccagttccttggcagatttttcaccagcagtgagctgggcacagaggttggggtttggccctctaaacacctgggtgtagaggtccagcctctggttacttggtcttcacagcgccccccaccttctgagctactcaagagatgggggacagtagcagtactgccaagaacagttgtgcaagttgcgcactgcacaagcatgccagacagaggctagagcagaagctaacatcatctgttcccctcaccacacattgcatctgcccagaggaagaggtaccttttatttattttattttattttatttattttattttttgagatggagtctcactgttattgcctgggctggagtgcaatggcacgatctcagctcactgaaacctctgcctcccaggttccagcaattctcctgcctcagcctcccgagtagctgagattacaggcgcccaccaccacgcccagctaatttttgtatttttaatagagacgaggtttcaccatgttggccaggctggtctcgaactcctgacctcaggtgagctgcccacctcagcctcccaaagtgtgggattacaggcatgagccacggcacccagcaaggaaggggtaccttttaaagatctacacaaggccgggcgccatgactcatgcctgtaatcccagcactttgggaggccaagacggaaggatcgcccaggacctgaagaccagcctaagcagcatagggagaccaccatctctacaataaataaataatgagaaaataaacatcctggccgggcgttgtggctcacgcctgtaatcccactgctttgagaggcctaggcaggcagattgcttgagctcaggagttcaagaccagcttgggcaacatggtgaatccctgtctctatgaaaaatacaaaaattacccaggcatggtggcgcacaactgtggtcccagctactcagggggctgaggtgggaggatcgctggagtggaggctgcagtgagctgtgatcacgccactgcacaccagcctgtgtgacagagtgagatccagcctcaaaaaaaaagagaaaagtccacacaaagttgacagtgaaccagctgcatctctgaacacatccagtgataccccctccaccccgctccaggaaacccaagattgctgacaggcccagctacagcagctttgagctggctgcagcctgtggggtcctctgggagcagctgaatggaatttgttcatgctttcactcaacaagtatttactgggtgtttatttcatgccaggtgccgtgctgggcagtgaatgaatgaaccttgccctggggttaacactccagtgggatgaacagacaaaccccacaagcactgcatacggtatgcaaaatggggtgcatgctatggagggaaatacagctgggaagggtgggggcgggcaggggccctgggtgcaatttttacaaagtgacctcactgaggaggtgacattgcagcaaacccagaagcaggcaaggaggagtcatgtggctggctgagggaacagcattttaggcagggggaacagcctgtgcaaagcactgagaccttgttttgtgaattgagcaccttgaaatatgggttgcttggccctagttaaggttctgaaagagcctttaattttttttcccctagacctgggtggggcggctcatgcctgtaatcctaactactcaagaggctgaggtgggaggatcacttaagtccagaaggttgaggctgcagtgagccatgatcataccacacggcacttcagcctgggtgacagagcaagactttgtctcaaaaacaaaaaacaaaaaaatccaattccggccaggtgcggtggctcatgcctgtaatcctagcactttgggaggccgaggcagctggatcacaaggtcaggagttcgagaccagcctggccaagatggtgaaaccccgtctctactaaaaataaaaaaaaattagctgggcgtggtggcatgtgcctgtagtcccagctactcgggaggctgaggcaggagaattccttgaacctgggaggcggaggttgcagtgagccgagatcgtgcactgcactctagcctgggcgacagagcgagactccatctcaaaaaaaaagaaaaaaaaaatccaattccaacctatacaaggcagcagctgtgaggtgacacaagtatgaaccccattaagtccccccaaaagccaagaatcttggatttccttcacaagtgaatgacccccccaaatcttgaaggaaaatcattctagcagcaaatcctagacaggagttactatcagccagatattgccatctgccttaactggtttaatcctgacagtgaaccccaatgatgtagaaaatgttaccaccattttttttttttaatacagagtcttgctctgtcccccaggctggagtgcgctagtacaatcttggttcactgcaacctctgactcctgggttcaagtgattctcctgcttcagccttccaagtagctggcattacaggggcacgccaccacacctggctaatttttatatttttagtagagatggggttttgccatgttggccaggctggtctcgaagtcctgacctcaggtgatctgcccgcctcagcctcccaaagtgctgggattacaggcgtgagccaccgtgcccggctgttatcaccattttacaggtggagaaaccaagacacagaacaatgcagtggctcccatgtgtggataagaagtagcttgtagatttgaacccaggacacctttctgtgcattgagccaggccgatctgcacccaggcacctgcccaggtggatgcagggcctgtgagattcttccaaggcctcccattttgatggggtccccaggcctccaggcctgcactggagctggtctgcttccaggtggagccaacggagggtcctggtgcgggggagtcggcgttggtgggtgattgatggtttaatatctcgcgctgcgacctgggcccctcctctcccacgcctctgtgggtggcccccagtgagaggcggagatgggataattcggttaccaaaaagagaatgaaaattccagagagagaaagagacagagaaagaagtgcagaccagggagtgcgctgggagctgatttggcagggctgggctgggcttggatgggagggaggaggccgactctcaaatccggaatccctctgggggcctggggactcataggtcccagccgtcttcaactcccatctgacttcctgtcttgagaacagagacagcagatgtgacaagtgagaggtcacaggcaggggcaaggcctcagaggagagggaagcatgtggcctccgcctgggacaactgctggcaggtgaggccaaggggaggtagggactagtggagttggggtggagggaacgggagactccaagttcccagctcagaggcttctggtcatccttgactggagtcctctctctctttttttttttttttagatggagtcttactctgtctcccaggctagagtgcaatggcatagtcttggctcactgcaacctccgcctcccgggttcgagcaagtctgcagtctcagcctcccgagtagctgggactacaggtgtgcagcaccacgcctggctattttttgtatttttggtacagacggggtttcactgtgttggccaggctggtctcgaactcctgacctcaagtgattctcccaccttggcctcccaaagtgctgggattacaggcgtgagccaccgcgccccgctggagtcctctctttttttctctttccatccacgttcgaacctcggacttcatttcttccccacctccccggccctcacctggtccagcccagcatccctcacctggactgtgcagttccctctacccttgctcaggtctccagcctggccctgaagcctgttccctccgcagcctccagagggcgcgagcgaacacctgatcaggccacgccccctcctcccgctcagaacccagaaggctcccaacttgtgttaatttcccatggttgccgtcacaagctagcgtttttttaacgacgcaaattatcctacagctctagaggtcagagatgtggttcgggtctcacctgcctaagaccaagatgtcagcaggctgcagtcctttcttggaggttttaggggatgatctatttcttgctcatttaggggtgcaagattcagttcctcggggttgtagaactgaggcccctgttttcttgctggttgtctgttccccgtttctagaagttgcgtgcattccttggctcgtgggccctccctccattttcaaagccagcaatgacgagtcaagtccttctcatatgacagccttcaactcccctctgccgccgccttgcactttaaggacttgtgtgattagatgatccaaggtcatttccctgtctgaaggtccttaattacctaatcagcaaagtcccttttgttgcatgaggtagcaattcactaaccttgcttctcagggcctggctgtgtccaaaggactctttctcctttagacacttttaagtgtctcacctgtcctctgcctctccctgggcacctgctccctgctcagcctgcctctcccgcaattcaagccagtcatatgcttgacactcctccaggaagcctccctgaagtacccatgtttatcaacccactggagcagttaccagcccctttctcctatcctccccaggccacgagatcttgaaagtttaggatgaggaagtagatatgttgggaaggagggcattattctccttaccaactgcctcactcagagcaaaactccagtcctcacggaggccagaaaacccagctttctccaagcagatgggcctccttactgttctccaaactcaccaaagacatcctgcctcagggcctttgcacaggctgttccctctgcctgagtcatcctcccccagatatccacatggctcctccctcacctcctccaggtctcccttcacgtgtgcccctccccagggaagccttctctgatgcacacacacccaatttacaacatccacagactcttattgctgcttttttttttttttttgagacagggtctcgctgtgttgctcaggctggagtgcagtggtgtgctttcagctcactgcaacctccacctccgagttcaagtaattctcctgcctcagtctactcagtagctggaattacaggcatgctccatgacacctggctaatttttgtatttttagtagagacggggttttgccatgctgaccaggctagttttgaactcctagcctcaagtgatccgcccgcctcggcctaccaaagtgctgggattacaggcctgaggctgctgtattttctccattgcactggctacttttggctacaccacagaatattcactccttgttcatcttgtcatcgcccaggtctcccactggaaagtcagctccaaaagggaagttcctccacactgttcccttctggctctgtatgccgcccccttccctggcccttggcatacagcaggtgctcaataagtgttaaggctgggcgcagtggctcacgcctgtaactaccagcactttgagaggccgcgcggacagatttgagcccaggagttcaagaccagcctggccaacatggcaaaaccccgtctttactaaaaatacaaaaattatccaggtgtggtgatgcatgcctgtaatcccaactactcgagaggctgagaaatgagaattgcttaaacctgggaggcagaggctgcagtgagcagtgatcacgccactgcactccagcatgggcatcaaagccagactgtgtttcaaaaaataataataagtgtttgttgagtgaatggatggcaggcaggcagggccccagcccagaggaggatggggacccagtggaaggtgggagcggcgggtggagagggattggtgtggagatggtagagaaaaagaccttctagaacaatcctgggggtcaggtggtccctgtgatgaaccatcattgtgtgaattcagtcaagggctgatctctcatgatctctataatgtgcttttcacagggaaacatgtcccccctgccccacaatccccttgataaaatcttagctttatgactttgttctctgttcatctcagataacagatgttcctggagttgccttagtcacagggcagcgtggcttcaattcaaaacaaggaatgtccagacccaagctggggccttgatttagacttcaatcctatttccttctgcctctcctccatccccaccagcatcatgttctgggggtctgggtagtgcaggggccccttccttcttgctttcctctcctttcctttcacggccagggctgcagctccaggagggaatatagtgtgtcaaatggtggccccccaaaaggatgtgtccacattctggcccctgcaacctgtgaatgtgatgttattatattcacttttttttttttttttgagatgaagtcttgctcttgtctcccaactggagtgcaatggcgcgatcaaggctcactgcaacctccgcctcccaggttcaagtgattctcctgcctcagcctcctgagtagctgggattacaggcgcctgccaccacgtccatctaatttttgtgtttttaggagagacgggctttccccatgttggccaggctggtctcaaactcctgatctcagatgatccgcctgcctcggcctcccaaagtgctgggattacaggtatgagccaccacgcctggccaacttatttttttttttaaagacatagtcttgctctgtcactcagggtggctagagagcaatggcatgatttcggctcactgcagcctcgacctcccaggctcaagtgatcttcccacctcagccttccaagtagctgggaccataggcatgcaacaccatgcctggctaatttttgtattttttgcagagagagattcttgctatgtttcccgggctggtctcaaagtcctggcctcgagagagcctcccacctcggactcccaaagtgctgggattacaggcgcgagccactgcgcctggcctgaatgtgatcttaggtggataaactgtaactgtcataggcccattgtttgaggcactgggcaagtcaacatgctgagataccagtttgcagcagagaaggaggtttaatcatagggccacagatcgaggagatgggagcaaatctaaaatccatctcctgggtgggtgtggtggctcacacctgtaatcccagcactttaggaggctgaggtgggcagatcacttgaggccaggagtttgagaccaccctggccaacatggcaaaaccctgtctctactaaaaatacaaaaattagccgggcgtggtggtgcatgcctgtagtcccagctacttgggaggctgaagtgggagaatcagttgaacctgggagatgaaggttgtagtgagccaagatcgcacctctgcactccagcctgggtgacagagtgagactgtctcagaaaacaaacaaacaaaaatttataaataaaaatgaaataaaataaaaaaattcatctccccgaggaatttggggctggggtttttaaggggtatggagtgggcccaagtgtggagatcctttgattggtcaaagagtgcaaggtgaagtcttgggagagaggattgggcgggagttgagggacaaggggtgggtgaagaagctgtattctcatgctgatcccattcctatatgcggggtcttcttcagactggttgctggaattcaagatctgcaaaaacatctgaagtgatccttaagcaaaagccatatgatcctgactgggcgcagtggctcacgcctgtaacaccagcacttggaggccgaggcgggtggatcacttgaggtcaggagttcaagatcagcctggccaacatggtaaaaccccttctttactaaaaatgcaaaaattagccaggcgtggtggtgcacgcctgtaatcccggctactctggaggctgaggcaggagaatcgctggaacccgggaggcagcggttacagtgagctgagatcacatcaatgcactccagcctgggtgacagagcaagactccatctcaaaaaaaaaaaaaaaaaaaaaaaaaaaaaaagccatatgctcctaatgtcagagatcctgtctgtagaaacaatgggatgtatttgtgttttgttttgttttgagacagaatttcactcttgatgcccaggctggagtgcaatggcacgatctcggctcactgcaacctctgcctcctgggatcaagcgattctcctgcctcagcctccccagtagctgggcttacaggcatgcaccaccatgcctggctaatttttgtatctttggtagagatggggtttctccatgttggtcaggctggtctcgaactcccaacctcaggtgatccacccgccttggcctcccaaagtgctgggattacaggcgtgagccactgcgcccggtgaaacaatggggtgtaaaagtgctacctgacttttagcagcaaggaagggggccctagtgcagcctgattcatggttcattgtaactgtatttctgtctggaatctagcatgcaatccttgtcaactctgtaggagggattttgaaagggtcattgcagatattagaattctcaagatgagatcatcctggaaaacatggtagtcctaaatccacagacaactctccttaggagagacacatagaggagacacagtagagaaggacccgtgaagacggaagcagaggttggaaggctgtggttgccaccgaggaacgcctggagccctcacaagctggaaggggccaggagggattcttccctagatcctctgtggggagcgtggccctgcagatgctttgatttcagacttctggcctgtagaactgtgagaaaataggtttctgttgttttaagtgactcagtttgtggtactgttatagcggccacaggaaggaaacaaatccgggggtcagatggttctcattacactgggtctgctgtcagccaaccttgcctctcagggcctagtggtgttcagaatgaaatctttcactttcttttttttttttttttttttttgagacaaggtctcactctgtcacccaggctggaatgatgtagtggggcaatctcggctcactgcaacttctgcctcccaagttccagcgattctcctgtctcaggccaagtcaggtggatcacttgaggtcaggagttcaagaccagcctcaccagtgaaacctcatctctactaaaaaaaaaaaaaaaaaaaaaaaaaaaaaacacaaaaattagccaagcgtggtggtgtccacctgtagtcccagctactcggaggctgaggtgggagaatcacttgaacccaggatgtagaggttgcagtgagctgagattgtgccactgcactccagcctgggcaacagagtgaggccctgtctaaaaaaaaaaaaaaaaaaggctgggtgcagtggctcatgactgtaatcccagcactttgggaggccaaggtgggtggatcacgaggtcaggagttcgagaccagcctgaccaacatagtgaaaccccgtctctactaaaaatacaaaaattaggttgggtgtggtggctctcacttgtaatcccagcactttgggaggccaaggcaggtggatcacgaggtcaggagattgagaccatcctggctaacatggtaaaaccccgtctctactaaaaatacaaaaaaaaaaaaaaatttgccgggcatggtggtgagcgcctgtagtcccagctactccagaggctgaggcaggagaatggcacgaacccgggagacacagcttgcagtgagccgagctcgcgccattgcactccagcctgggtgacagagtgagacttcatctgaaaaaaatttatcttccgagtaatgtgcaaaggaaatcagtattcggaagagctatctgcactcccaagttctttgcagcactattcacaataacaagatatggaagcaacctaagtgtccatcaatgaatgaatggataaagaaaatgtggtgcatatacacaatggagtactgttcagcctgataaaagaaggaaatcttgtcatttgcaacaacgtgcatgaatctggaggacattatgcgaagtgaactaagtctggcgcagaaagacaaatagttcatgatctcacttgcatgcagaatctaaaaaaaaaaaaaagtcacattcacagaagtagagagtagaacagtgcttactagagtctggggtcgcagaaaacatgtggcccaaaggatacaaagtttccagtaggaagagtaagtgctggtgatctgttgcacagcaaggtggctatagctaatcataatgtatatttttttctttttcttttttttttttttgagacagagtctctttctgttgcccaggctggagtgcagtggcacaatctcagctcaaggcaacctccacctcccaggttcaagcaattctctgcctcagcctcctgaggagctgggactacaggcgcccgccaccacgcctggctaatttttatatttttagtagagacggggtttcaccatcttggccaggctggtcttgaactcgtgacctcatgatccacctgcctcagcctcccaaagtgctgggattacaggcgtgagtgactgcaccccgccccataatgtattttcaaacttgtgaaatgagtggattttaaatggtctcactatagggtctggtgcggtagctcacatgtgtaatcccagcactttgggaggctgagatgggaggatcacttcagcccaggtgttcaaaaccagcctgggcaatattttacagaacctgtctctaaaaaaacaaactgttcttggtacaaataaataagtatgtgaggtgatggatatgttcattagcgtgactgctttataatatatacagtattgaaacatcatatcatattccataaacatatgcaattacttgtcaattaaaaataaaaattagggatcagatatggtagctcacacctgtaatcccagcactttgggaggccaaggcaggtggatcacttgaggtcaggagtttgtgaccagcctgactaacatggtgaaatcccaactctactaaaaatatgaaattagccgggcgtggtggcacgcacctgtaatcccagctacttgagggcctgaagcaggagaatcgcttgaatccaggagggggaagttgcagtgagccaagattgtgccattgcactccagcctgggcaacagagcaagactctgtcaaaaaaaaaagaaagaggctgggcacggtggctcacgcctgtaatcccagcattttgggaggccaaggtgggcagatcacaaggtcaggagtttgagaccagcctggccaacatggtgacacctcatctctactaacaacacaaaaattagccgggtgtggtggtgcgcacctgtagtcccagctactcaggaggctgaggcaggagaatggcgtgaacctgggaggcagaggttgcagtgagccaagattacctagtgacagagcaagactgtctcaaaaaaaaaaaagagagaaaaggaaggaaggaaggagggagggagggaaggagaaagaaagaggaaggaaggaaggaaggaaggaaggaaggaaggaaggaagggctgggcgcagtggctcacgcctgtaatcccagcactttgggaggccgaggcgagcagatcatgaggtcaggagatcgagaccatcctggctaacacggtgaaaccccgtctctactaaaaatgcaaaaaattagccgggcgcgatggcaggcgcctgtagtgccagctactggggaggctgaggcaggagaatggagtgaacctgggaggcggaggttgcagtgagccaagcttgcagtgagccgagattgcgccactgcactccagcctgggcaacagagcgagactctgtctcaaaaaaaaaaagaaagaaagaaaggaaagagagagaaaaagggagggagggagggagagagagaaagaaagagaaagaaaaaaaagaaaaggaaagaaaagagaaaagaaaagatcttcactgtggtctggcttccattgctagtcgttgtgtctgcctggttgaaatgtccatcttagcattctgttactctatcggcattcagctctggtagtcactggtgtgacattattgcataaatgttcctggccaacagagaaggggaaaatttgtagaagggaagaaagaatggatgagggagcatgggtggaaaacttaagggtggtctgagctatacccaggaagcctcggattgggaaaacccaactctcagcgtccttggggctgagagcaacataaggtttagcagccttagtaatttctttaaaatctaaattggggccgggtgcagtggctcgcgcctgtaatcccagcactttaagagacggaggtgggtggatcacctgagatcaggagttcgagaccagcctggccaatgtggcgaaactccatctctactaaaaatacaaaaattagctgggcatggtggcaggcacctgtaatcccagctacttgagaggctgaggcagggataattgcttgaacccaggaggtagagcttgcagtgagccgagatggtgccactatattccagcctgggcaacacagcaagactccatcttaaaaaaaaaatctaaattggaccaggcatgttggctcacacctgcaatcccagcactttgggaggccaaggagaccagcctggacaacacagcaagaccccacctctgcaaaaaactttagaatttgccaggcagtcacaagtcccacccaggtttaggaggtgggaacacaggtcctgtgatatggtttgcatttgtatccccccccacccaaatcttatgttgaattgtaatccctggtgttggaggaagggccaggtgggaggtgattgcatcatggggtcagagtcctcccttgctgctcttgtgatagtgagtgagttctcacaagatctggttgtttaaaagtgtatagtacctccctcctctttctcttgctccttctccagccatgtttccccttggccttccaccatgattgtaagttttctgaggcctccccagctatgtttcctgtacagcccacagaaccatgagccaattaagcctcttttctttataaattacccagttttgggcatttcttcataacagtgtgagaaggaactaatacaccccgcctctcatgagaggagtaccagcactttgtaagaagagcctatgcaatatgatcaataccagggctgacaatctttgcaaatcacaacctgtcattcctttctcacttcccagcttccctgttgctatttcctgggatctgctcccaggtcaacaacttacccctgcaaatctttgtctcagggtctctgcctttgggaggacccaaactaagatatcccacaaaatcaatagtgtgtttatatagctggtataggtgtatgtaaacatttagaaaaaggtctgtaaggatacactccaaacagacagcagtagcttctgtaaggagggaactgggatgggggttgagagggttcatgtattaggccgttgcctatatgggtaaatttgctgtaaagaaatatcaaagaatgggtacattttattttatttattttactttatttcactttattggagatggagtctcactctgttacctaggctagagtgcagtggcacgatcttggctcactgcaacctcctcctcccaggttcaagcgattctcctgcctcagcctcccaagtagctgtgattacaagtgtgtgccaccacactgggctaatttttgtatttttagtaaagatggggtttcaccatgttggccaggctggtctcaaactcctaacctcaagtgatccgcctgcctcggcctcccaaagtgctgggattacagacgtgagccatcacacctggctagaatgggtaatttataaagaaaagaggcttaattgactcacagttctgcgggctgtacaagcacagtgctggcacctgcttggcttctgggaagatctcagggagctttaactcatggcagaaggtgaagcaggaacttcacatggcaaaagcaggagcaggagagagaatggggtggaggggaggtgccacacacttaaacaaccagctctccaggccaggcgcagtggctcatgcctgtaatcccaacactttgggaggccaaggcaggtggatcatttgaggtcaggagttcgagaccaccctggccaacacagagaaaccccatctttactaaaaatacaaaaaaattagctggccgcagtggcgcaggcctataatcctggctactcaggaggctgaggcagaagaatcgcttgaatccaggaggtggaggttgcagtgagctgagattgcaccattgcactccagcctgggtgacagagtgagaatccatctcaaaaaacaaacaaacaaaacaactaattctccaaagaactcactcacaattgtgtggacagcaccaaagagatgacgctaagccattcatgagggatccgcccccatgatccaatcccctcccaccaagccccacctccaatattgggaattacagttcaacatgagatttggcagggaaacagatccaaactacatcagttcatctataatatatgatttttttttttttttgccccgagggaggaagaattttctgaatccctgtggttagtaaaagagagaggcggccgggtgcggtggctcacgtctgtaatcccagcattttgggaggctgaggcgggctgatcacgagatcaggagatcgagaccatcctggctaacatagtaaaaccccgtctatactaaaaatacaaaaaaattagccgagcgtggtggtgcatgcctctagtcccagctactagggaggctgaggcaggagaatggcgtgaacccaggaggcggagcttgcagtgagccgagatcgtgccactgcactccagcctgggcgacagagcgagacttcgtcttaaaaaaaaaaagagagagagagagagacatgatcaggaagccgtcatgatgactcgtggagacactggccctgaagtagctgcaaccctcttaatacacaggaagaaagggctgggatgcaggaagaaagggctgggaggcaaacacaggcagcccctctgtgaaccctcaggtaggagccaccagccattttactgctgagtttagcatttggggttgttcaagagttcagggcttctgggagactagagaatgccttcatctccagggcactaaaacctcagttacctaatctgtgaaatgggtatgatcatagcaatcccacaaaactgctggtagggttacatgtaattatttctcctttttttctttttttaagagatgggttctccctatgtatgttgcccaggctggacttgaactcctaggctcaagtgatcctcccaccttggccttccaatgtgctgggatcacagtacattttttcttgtagaaacagggtctccctgctgggcacggtggttcacacctgtaattccagcactttgggaggctgaggcgggtggatcacctgaggtcaggagtttgagaccagcctggctgacatggtgaaaccccatctctactaaaaatacaaaaaattggccaggcgcggtggctcacgcctgtaatcccagcacttcgggaggccaaggtgggtggatcacgaggtcaggagatggagaccatcctggctaacacggtgaaaccccatctctactaaaaatacaaaaaattagccaggcgtggtggcaggcacctgtagtcccagctactggggaggctgaggcaggagaatggtgtgaacccgggaggcagagcttgcagtgagccgagatcgtgccactgcactccagcctgggcaacagagcgagactccatctcaaaaaaaacaaaaaacaaaacaaaacaaaaaattagctgggtgtggtggtgggcacctgtaatctcagctactcaggaggaggaaaatcgcttgaatccgggaaacagaggttgcagtgagccgagatcacaccattgcactccagcctgggtaacaaaagcaaaactctgtcttacaaaaataataataataaaataacaatggattggttgagagatcaccgtatgccagaagttgctttaagcattttgcatgtattaatccattttacacctcacaatatcgctaccaagtagaaacgattatctcgattttgtaaaaggtgaaacaggaaaaaaccactagagcagagctggcagaccctcaaccttcttttccttctgactccaaatgacagacagcattctttccatctctcacctcctcatgcctcctgtggaaaaaatgaatgaacagatgagaaaagttggagctggagaaagaccgtgttcctcgtgttctgtgagacctgggaaggctgctaaaacccagggagcaggagttctcctccctccatccttatccacagtctgggtcccatccagaccctcctctccaaaccgggggtttgcgacaaagcaggtgagggaggcatttcattccagagcagaagaaggggtttcctcccccatcccactcccgtttcatttttaaggggaaaagcagctccccatacggtgaggcaatgaggcggaccagcaggttcccggggatctctgcagccccgttgccataacaaccgaactcactcgcagcctctgataggggagtcagctgggaccacagcttgggcaggaaagggatgagggagtaggaaagaaacttcaagatcaaccactggccctcacaccgagctgcgcacaccccaaggccaagggaggctggaaacccttgtcatccttgggaaatgggggagggcactggtacccctgggacctccctcctgaatctgggcagctttaaacattttttttccaactttggaagacagttgtacaacctcgaaggagaggaggtgtcacgattcacaaagcgtatggatcacacatggctctaggggacattctctttgctctgttttattttgagatagggtcttgctctattgcccaggctggagtccagtggcatgatcacaccttactgcagcctcaaattactggactgaggtgatcctcctgcctcagccatgtgagtagctgggactacagacatgcaccaccacacctggctaatttttaaaatatatatgtttttgtagagatagggtcctgctacattgcccaggctggtctcaaactcctggcttcaagtgatcctcctgctttggcctcccaaagtgttgggattataggcatgagccactgcatccagcatcatttcttttcattattattatgattattattttgagatggagtctcgctctgtcacccaggctgtagtggagtggtgtgacctcagctcactgcaacctccacctcccaggttcaagtgattctcctgcctcagcctcctgaggaggtgcgattacaggtaccctccacaatgcctggctaatttttttttctttttgagacggagtcttcctctgtctcccaggctggagtgcaatggcgcgatctcagctcactggaacctctgcttcccaggttcaagcaattcttctgcctcagcttcctgagtagctgggactacaggcaggcgcccaccacacctgactaatttttgtatttttagtagagacggggtttcaccatattggctggtctcaaactcctgaccttataatccgcccacctcggcctccaaagtgctgggattacaggcgtaagccaccgtccctggcctaacctggctaatttttatatttttagtagagacggggcttcaccatgttggcaaggcaagtctcgaacttatgacctcaagtgatctgctcaccttggcctcccaaagtgctgggattacaggcgtgagccactgcacccagcctaatttttttttttttttttaatgaagacagggtctcactacattacccaggctggtctcgagctcctggcctcaagcgatcctcccatctcagcctcctgagtagcttggattacaggcacaagccatcatgactggcttcctctttttttttttttttaatgaatatggtaaagtgcacaaatcataaatttcagcgtggtgaatttctacacatgtatacccatgtatccaccatgcagaccagaagaacatatttgtccctccaggaaattcccaaatgctctttctcagtcaatatcctccaatttgacattttcatcatagattagttttgcctacccctgaactttgtgtaagtggaaatacatggtttggcatcttgcttttatgcaacattgtatctgtgagaatctattgtcatgtctgttttcctgttctttttctttgttgtataatattccattgtggagatgtatcacaatgtatttatcttactgctgatagatatttgagttgtttgcagtgaatggttattgtagataaagcagctatgaacatccttgtacatgtcttttgatgaacataagtttacctcttgtggggatgtggacagggtctcactcagtaactcaggctggatcgcaggaacctggctcactgtagcctcaacctcccaggctcccgaatagctgggaccacaggtatacactatcacacccagctaatttttttgtaatttttgtagagacagggtctcgctttgttgtccaggctgctcttgaacccctggttcaaactatcctcctgccttggcctcccaacatgctggggttacagacatgagccactgtgcccagcatcttggtttattgaatgctggcgacctgccaagaactttacatcagttatatccttacatagtcacaacattatttatttaattcactcattcaacacatatttgaaaatctagtaggtgccaggtattgtgggacacaccgagaataagaatcaaggtttataaattttggccaggcgcggtggctcacacctgtaatcccagcactttgggaggccgagacaaacagatcacttgaggccgaaacaaacggatgatggaggccagggcagaagccaggaggctgtggccaaggcaacctcagtaaatccaggcaagtgatgaaggagttgggaagcacaaacgtgaattcacgttctctctctttttttttttttagagacagggtcttgctctgttgcccaggctggagtgcagtggtgcgacctccgctcactgcaacctccgcctcccagttcaagggattctcgtgcgtcagcctcccaagcagctgggatgacaggcatgcaccaccataccggctaatttttgtacttttttttttttagtagagacagggtttcaccatgttggccaggctggtcttgaactccttacctcaaatgatctgcccgcctcagcctcccaaagtgctgggattacaggtgtgagccactgtgcctggcccttaacttgacttattttttcaaaaagttttttttttttaatttgagacgggtttggctatgttgcccaggctggtctccaactccttgcctcatgtgatcctcccacctcagcctcaggttctttgaacataattattcccaacttacaagtagagagaactgaatctcagagaggttaacttgcctaaggtcacacagctatgaaatggagaaagggtaagaaaatccgtctgaccttccttcagttatgcaaaagatgtcatgtggtgggtggtgtgacctcagaaaacctagaagagttgggggtccaggctggtggtggggtaaaagacccaagtgaacacacctgtcctgctggggtcactactcacccctaggccacagggcaagcaaagtggcaagccgcaaattgaattgtggggctggagggggatgtttcattgatgtcacaaatgagcatggaccccatatctgcagcagggatggttcagggccagtcaaggagatgatcggggcccacggaccctcaaacgcgtcaggaagccaggttggtccctgagtgtgtgtgatggggtgtgtgtttgttggggggactgccgccgcccgccccattagcaccgtcattatcccagatttacgtatgtataatttttcttcctccccctccccaaaccgctccaacatctctcctggctgcaaacccgcctcccccagaaacagccacggagccgcctgccaccgggccattagcacgcagggaagggggtgtggagggagggggcaggcagcagggaaggggaaagggggagccaggagaggacgagggaggcaggagctgtaaggatgggagtgaggcggcaagatggaagagaagaggggaaggaaacagggcttggaggagatggggaacctctgagggttctggggggagggggggacacgtgtcccagaggacctggccgcagacagcggccccaggggcagccgagggtctcctgcgccctttctggccaatgccagggctgagaataggggtgtgggggtcccatcggccgggactctgtggctgggtctcagcccagaagttactagagggcctcgcgccggaacccctcccccactctgggaacctccgcctgcggggtggggtgggggtctccaggctgggcgcggggagggcgccggctgcagagctgggagcccggagcgatgactccatcaccctccacttttccctcctcgcccccgaacctggccccctcccttcttgcgcccctcgggttgggggcgcgggagagcccccctctattacgagggaaatcaatgccgcattaatgcaaggtttccaggcaaggagaggggatcgcttcataaaagatgcattgttcccattgcctgcacgcggctccctccccagcatcctgcaagatggcggcggccccagggagggagggggaggggctggggggagcgcggccccctctctccggctggggaaggtgggaagagaggccgggataaaggaaggaaagggagagagggagggaggagggggctgggaggctgagagagcgttggggaggcgggagccagtcagagggaggagggcgggctggggaggaggagagaggggatggctgggaactcggaggagggaagaggaacgaagcccaaggaggtggcacgggggaggcaggagagcaggccggggggttgggagtggggggcgctggggcctggaggggggcaggcgggggtgggggcaaaaggggagggaaaggggagaaaaaggccgactgggcagcgtgaccaggagagaggggaagacagtaccccctcaactgtccctaggctccaagcccccctccagcggggccccttggttctctctcttggtccccgtacaccctcccgccgaggagatgatccagggagcccccattttctggcatggaggccgctgcaccccattggcttgcctccctaccctccttcctgccttggcaccacggctgccatgctgagagggatcaagcctcctccatctgcctcccaagtcaaggcctccagagttgacccgaaagagctccttaggaagaaactgccgtttgggcacacctgcatccgtcctacctgctggggacggttccagaaaccagacagagtttccagagagggaaactggggcagaggacagccgagaactcaacacgggggggcagcgccccacccgtgaccccagaccaacctcagcccccctcctccccgccttttcttccatcctccgctggcaaccacgaagagagtttcaaggccccccacttcccagccttcctgcttcgcctaggggagctcccaaacgcctgaaaatatctttaaattaggaaaagagctaagccgccagagtcctttggtctattaaaggaagagcagaggccaccggcgcccccaccccatccccagcccggttttgcatttgaagccctgaccgcggatctagccggaacaatgaccgggcctgcccagccggccccagctgaatccctttcagtggtcctgggccccctgccaggtgtgccaaaatgaggacggctcccctcctaggcccttttcatcccctcggggctgctggggcctcagaggcgctaatgaagcgcctcttgccgccttccctctaggaagagggggcctgggggagcgggaggcagggccacattgggggcaggcgcctggaaatctgccttccaagaactgccccaggaacatgtttttgtgccttggtcagcagcagctccctccctccctgctcctcagagtcctcccacaggttctggtgacatccacctcctccaggcagccctcccagcctgctggcattggctccctactgtgtttccttcggagttcggcagtgggggcaggctgcctggattcagattggagctccattgctttctggctgtggctcaattagccaccctgagcctcagtttccccacccgtcaagagaggagaattataaaaacctatgtcatgagactgttgtgaaggagtcgctgtgtgaagaaatgtggaaggtcacacgtgcaaagtgggtgcaataatccctagactttcgcctcagccataggggcccctcactgcaccccagacacacccagtgtgtgcccatttctgggacttcccactggctgttctctttattttatttgtatttgtattttttcttttgaggcggagtcttgctctgtagcccaggctggagtgcagtggtgcaatctcggctcactgcaacctccacctcctgggttcaagcagcttcctgagtagctgggattaccggcgcatgccaccacgcccagctaatttttgtatttttagtagagacggggtttcaccatgttggccaggctggtctagaactcctgacctcaggtgatccacctgcctcggtctcccaaagcgctgggactacaggcatgagccaccgcgccggcctttttttttttttttttttttttttttttttgagacggagtctagctctgtcgccgaggctggagtgcagtggcctgatctcggctcactgcaagctccgcctcccgggttcacggcattctcctgcttcggcctcctgagtagctgggactacaggcgcccgccaccatgcccggctaattttttgtatttttagtagagacagggtttcactgtgttagccaggatggtctcaatctcctgacctcgtgatctgcccacctcggcctcccaaagtgctgggattacaggcgtgagccaccgcccccggccttctttttttttttaagatggagtctcgctctgtcacccaggctagagcacagtggtgtgatctcactgcaacctccgcctcttgggttcaagcgatttctcccacctcagcctcccaagtagctgggaccacaggcacatgccaccacacctggctaatttttgtatttttagtacagacagggtttcatcatgttggccaggctagtctcaaactcctgacctcaggtgatccgcctacctctgcctcccaaagtgctgggattacaggtgtgagccaccttgccaagcccagtggtccctgttatttaccatcatctgtcttacagccagctgacattgtattacttacctgaactcaggatcttaggctctcgaatccaagaacctgggttcaaatcccggcttcacagttattagctgtgtgacattgggcatgttccttaacttctccgagcccctttcctcatttataaaatgaggatggtaataaaacccacctggagccgggtgcagtgtctggagtctgtaatcgcagccactcaggagctcaaggtaggagggtccctttaggccaagagtttgagaccagcctgggcaacatagcaagaccctgtctctaccaaaaaaaaaaaaaaaaaaaaaagccaggcacaatggcttacacctgtagtctctaaaaaaaaaaaatccacaaggccaggtgcggtggctcacacctgtaatcccagcactttgggaggctaaggtgggcagatcacctgaggtcacaggagttcgagaccagcctggaggggaggttggagtgcagtggcacaatctcggctcactgcaacttccacatctggagttcaagccattctcgaccttcagcctcccgatagctgggatcacaggcacctgccaccacgacctgctaatttttctatcgttagtagagacagggtttcgccatgttggccaggctggtctcaaactcctgacctcaagtgatcctcccaaggtgctgggattataggcatgagccactacgcccagccctacactttggatttaactttgattcctgctcatatgcagagtttcaaactgcttaaatgtctgcaacatttagctgcaaggaagaaagcttaacacaaagtcctccagggagcaaaaaactgcatcactacgcccagctaatttttttgtattttcagtagggatggggattcactatgttggccaagctggtgttgaactcctgacctcaggtgatccgccccactcagctcctaaagttctgggattacaggcctgagccacccgcccagcaacaaggctaatttgagggtcacttgtttgatgccttttcttgcccatgccataggtcagaactaggacaagcagagcaggtcatatataagctgtgtaagtctcttggccgctttgtaccttagtttccccatttgagaaaaacgaatggatcttaagacacacttttcagagttcataatgggcttatacccagctaaccaataattgtatgagtttttatacaaaatagttgtttacacgtattcatcttctatttcacttacaagttgtgtaaaaactgcattccgtgccaggcctgaaatgttccaaggctcagttctgtaattaaattgcagcccagatttctataaaaaaagacataagccaaagggaaaaaaaattatttcagaacatttatcatttgctgtgagtctaatttacataggatggagcatcacctcaatcctttctctgtgcactaaggcaatctcactgtggaagatactggcttatggtttatactttaatattgcacatgtggtgcattagctacaaaacagtgaacgctcagtaaatacctgtgttaagtgatcttcatttctctagaacaggatttcacaacttcagtaccatcgacattttggactatataactctttgccgtgggggtttgtcttatactttgcaggatgtttagcagcatctctggcctctgcccaccagatgccaggagcacaaccacagttttgtcaagcaaaagtgtctctggacattaccaaatgtcacctgagtacaaaaatcacaccagttgagaaccactgctctctgatgattcactatgatctgtgtaataattctcacactaatctttgctagagacaaaaaggacttgctatataattttagtacctttctactggtcaaattttaatcatatttcaaaatgaatagcaaagaggtttataatcaagttttataaaaattccaaatgtaataaagttatatttgtaacttacatatactgcaaaaatggtagtgattcaaatgtatgtctttcaatatatcgtattttattgcctttccaaatctctcccaggcagaattaacacatcccaggtgctcttacacagggttgagtagttcctgtggatttcagttgagtgatacctcccctgtctcccctgctatgctagaccctatctctgaggacaagaaatgggcctgttcattagcgcagctgagaaagaccaaaccaccttctgttctcttcttttcttttcttttcttttttttttttgagacggagttttgctcttgtttcccaggccggagtgcaatggtgcgatctcgattcaccacaacctccgcctcccgggttcaagcgattctcctgcttcagcctcctgagtagctgggattacaggcatgtgccaccacgcccggctaattttgtatttttagtagaaacggggtttctccatgttggtcaggcttgtctgaaactcctgacctccggtgatccgcccacctgggcctcccaaagtgctaggattataggtgtgcgccaccgcgcccggcattgaagaccaaaccaccttctggataaagccaagggatgtaaacctgccggggtctctgggcacttggaaacgcccatctgtttggaagtgagaggattaacacactggatgcataaactgaatgtcagtgaagaccccagggctggtatagaaactgcgtgggttcaaatcccagccctggggtcaggcacagtggctcatgcctgtaatcccaggactttaagagactgaagcgggcaagtcacttggggggtcaggagttcaagaccagcctggctaacatggcaaaaccccgtttctactaaatatacaaaaatcatttgggaggccgaggtgggcagatcacaaggtcaggagattgagaccatcctggccaacacggtgaaactcccgtctctactaaaatacaaaaaattagccaggtgtggtggcatgtgcctgtagtcccagctacttcggaagctgaggcaggataattgcttgaacccaggaggcggaggttgcagtgagccaagatcgcgccactgtactccagcctggtgacagagtaaaactccatctcaaaaaaaaaaaaaaaaaaaaagccgggcatggtggttcacgcctgtaatctcagcactttgggaggccgaggcgggcaaatatactgaggtcgggagttcgagaccaggctaaccaacatggagaaaccctgtctctactaaaaatataaaaaattagctgggcatgttggcacatgcctgtaatcccagctactcaggaggctgaggcaggagaatcacatgaacccggaaggcggaggttgcggtgagccgagatcacgccactgcactccagcctgggcaacaagagtgaaactccaattcaaaacaaaagaaaacgaaacaaaaaaaaaattagccaggcatggtggtgcacacctgtaatcccagctacttgagaggctggggcacgagaatcacttgaaccccggaggtggaggttgcagtaagctgagatagcaccactacactcgggcctggatgacagggcaagactccgtctcaaaaaaaaaaaaaaaccctacaaatcccagccctgcctggcattgactgagtcaccttaggtaagtggttttgctggtctgtgcctctgtttctctggctataacataggtacaatgacaatagggtcatttcaaggattaaatgagaaaaatgcctgttggctactcagaggtcaggtgaatacagtaagtgcttaatgagtgttggtcccatgcatgaatggaagcactgggtgagcacgtgcttgaggaagaagtgcaggaggccggatgcagtggctcacgcctgtaatcccagcactttgggagatggaggtgggaggatcgcttgaggctaggggttcgagaccacatctttacaaaaaatttaaaattaggccaggcacagttgctgacgcctgtaatcccagcactttgggaagccaaggcagcagatcacttgaggccaggagttcgagaccagcctggccaacatggcaaaaccccatctctactaaaaatacaaaaattagccacgaggggtggtgcacacctgtaatcccagctacttgggaggctaagcaggagaatcacttgaacctgggagatggaggtaacagtgagccaagatcacaccactgtactccagcctgggcgacagagtgagtgagactccatttaaaaaaaaaaaaaattagctgagcacagtggtatgcacttgtagttccagctgctgtggaggctaaggcaggagactcatttaagcccaggagattgaggctgcagtaagctatgattgcatcacttcactcccttctgggcaacaaagtgacacactgtctctaaaataaagaattaaaaagcctaccttggctgaggagatccacctggatagagcttgatagggaggagagatctttgcttcaattcagatgacagacaagaatgacttgccccaggctggtggcagtgcaggtgaggaaggctctatgggctcagggtgggttttggagttggagtggacagggctggctaatggattggatgtgagggatgacagaaaggggagtctgcagtgatggggtagagatgggttactatccgggtgcagtcgctcacacctgtaatctcagcactttgggaggccgaggcggccagatcatgaggtcaggagttcaagaccagcctgaccaacatggttaaaccccgtctctactaaaaatacaaaaatgagccgggcatggtggtgcgcacctgtaatcccacctactcaggaggctgaggcaggataattgcttgaacctgggaggcagaagttgcaatgagccgagatcgcgcatgatggttcatccctataatcctagcactttggggggccaagggaggtggatcgcttgagctcaatagttgtagacaggcctgggcaacatggtgaaacctgatctctacaaaaaatactaaaattagatgggcatggtggcgtgtgcctgtagtcccagctacttgggaggctgaggtgggaggaacacccgaccccaggaggttgagtctgcagtgagtcatgatcatgccactgcactccagcctggatgacaaagtgagtccctgtctccaaaaaaagaaaaaaaaagaacagagagtgaatggtggttaccaggggctagagtggagggactggggagatgttggtcaaaggctatacactttcagttagacaggaggaatacagtcaagagatgtcttctacagtatggtgactatagctaataacaatgtattgtatacttgaaaatcactgagagagattttaagtgttcttgtcccacacaaaaataggcatgtgaggtaatatatatgttaattcactccatttagccattctgaaatgtatatgaacttcaaaacatcatgtcatacaccataaatatgtacaattttaatttgtcaattaaataaattttaggccagtgcagtgactcacctctataatcccagcactttgggaggctgaagtaggcggatcacttgaggccagaagtttgagaccagcctggccaacatggtgaaaccccatctctattaaaaatacaaaatctagctgggcatggtggcatgggcctgtagttccagctactcaggaggctgaataggagaatcacttgaactcaggaggcagaggctgtagtgagccgagattgcaccactgcactccagcctaggtgacagagtgagactccatctcaaaacaaaactaaactaaacaaaaaattagccagatgtggtggcatgcacctatagtcccagctacttgggaaactgaggtagaaggatcacttgagcccaggagttcgatactgcagggagctattgatcgcaccactgcactccagcccgggcagcagagtgagaccctatctctattttttaattaattaattaattaattaattaattaacaacaacaaaaagcaaatgggcatggatgcatttcaattaaaaagaaatagttggtggctgaggccgtgatctcatctgaaagctcgactggggaggatccacttttaagctcatgagttgttggcaggatcagttgcccactggctgttggtcagaggcctcttctggttcctggccttgtgaccctctccaatgggcagctcacagcctggcaggtggcttccctcagagtgagcagaagagagggcaagaaagggagtgcatccagctgggcacaatggttcacacctgtaatcccagcactttgggaggctgaggtgggtgggtgaggtctggagtccaaaaccagcctgaccaacatggtgaaaccccatctttactaaaaataaaaaattagctgggcatagtggcccatgcctgtaatcccagctacttgggaggctgaggcaggagaatcacttgaaccgggaggtggaggttgcagtgagcagagattgcataattgcactccagcctggacgacagagcaagactccatctccaaaaaaaaaaagggagctcacccaagatgaaaggcatggtcttttttgtgacctaattttagaagtgacattgcatcgattttgccacattctatgggcaggaagcaagtcatagagtctaatcacactaaagggtagggcattaatgcaagggctggaacattgagggccatcttagaggctgtccccacaccatgcacgtcaatccagtggcttcataccacccgtacctgtgactctttgcctgactgctttgctctagtgcatgcaggcagccagaagttctggagaattcattttctctgctagcatacctcaactaataaaggctgggagttggaggataaataccccagctccctcaccctttgcataagataactcttggggtttgtccaagatgagttaagacctagatatcgcaggataacctgctcatttccacatgacatactggctgccctcccttctgcatctcacctcctccatcccctgccagcactccctgcaatcaccttccaggtaaaccacttttactcaaatcagagtgtctcaggtacacttctgaagcacccaactgtattagttttctagcgctgctgcaataaattaccacaaacttggtggcttgaagcaacataagtttgttattctcttacagtcctacaggctcaaagtccaaagtcaaggtgttggcagggctgggctccctttgaaggctctagggaagaatccttccttgcctctctcctagattttggtggctccttgtaatccttggtgttcctcaactcaaagctgcatcattccaatcattccatggagaggcttccatggtctctgtgtgtctctgtggtcctctcctcttcttagatggacacttgtcattggatttagggctcattctagtctagtaagacttcatctttttttttttttttttttttttttaagagacagggtcttactctgtcactcaggctggagtgcagtggcacaatcatggctcactgcagcctccaatttttgggctcaagcaatcctcccatcttggcctcctaagtagctgggactacaagtgtgtgccacatgcctggctaatttttaaaaatttttggctgggtgtggtggctcacaactgtaatctcagcattttgggaggctgaggagagtggatcatttgagctgaggagttagagaccagcttggccaatatggtgaaacttcatctctactaaaaatacaaaattagctgggtgtggtggtgcatgcctataatcccaggtacttgggaggctgaggcaagagaatcacttgaacccaggaggtggaggttgcagtgaggagagctcctgccactgcactctagcctgggctgcagagtgagactctgtctcaaaaaacaaaacaaaacaaaaagcccaggtgtggtggctcacacctgtaatcccagcactttgggaggtcgaggcgggtggatcacgaggtcaggagattgagaccatcctggttaacatggtgaaaccccatctctactaaaaatacaaaaaaaaaaaaaaaaaaaaaccattagccgggtgtggtggcgggcgcctgtagtcccagctactcgggaggctgagggaggagaatggtgtgaacctggaaggtggagcttgcagtgagccgagattgcaccactggactccagcctgggcgacagagcgagactccgtctcaaaaaaaaaatttttttttctttttatagagacaaggtttcatcatgttgcccaggctggtgtccaacccctggcctcaagtgatcctcccacctcagcctcttgcatagctgggaatacaggttcaagccacagtgctgggctagtaagatcttattttaacttaactaatgacatctgcaaagatgctatttccaaatatggtcacattctgaggctccaggtaaacatgaattttgtcaggggaggaagacactattccatctcctgcaccaatagaggacgatgatgtgtcattaactgagttggggaggacagaggaggggggaggacagaggagaggggaggacagaggaggggggaggacaggggtgaggacagagggggaggatggggggaggacagaggggggaggacagaggaggggggaggacagatggggaggacagagggggggaggacagaggaggggggaggacagagaaggcaggaggacagaggaggggggtggacagaggaggggggaggacggggggaggacagaggagggaggaggatggaggaggggggaggacagaggagcaggaaggagggggggaggacagaggagggggaggacagaggggggaggacagaggagcggggaggacagaggaggggggaagacagaggaggggatggacagaggagtggggaggacggagggggaggacagaggaggaaacaggtctggagtgtgatgaagagtctgcttccggtgtgatacttgggtgtacccactgggtttccagcggagacatctggggggcaggtgaaggtcagcagagaggtgagaggtggggacgccactgggagctgtcgggtgtaggtggcatttatttatttatttatttatttttgagatggagtttcactcttgttgcccaggctggagtgcagtggcgcgatctcagctcactgcaacctccaccttccggtttcaagtgattctcctgcctcagcctcctgagtagctgggattacaggtgcctgccactatgcccggctaatttttgtgtttttagtagagatggggtttcaccatgttggccaggctggtctcaaactcctaacctcggcctcccaaagtgctgggattacagtgagccaccacactcagcccagcatttattttattttttatttattaattttttttttctttttagacagagtctcgctctgttgcccaggcgggagggcagtggtgcaatctcgcctcactgcaagctttgcctgccgggttcacgccattctcctgcctcagcctcccgagtagctgggactacaggtgcccgccaccatgcccggcaaatttttgtatttgtagtagagacggggtttcgccatcttggccaggctggtctcgaactcctgacctcgtgatctgcccacctcgaccttccaaagttctgggattacaggcgtgagccactgtgcccagcctatttcattttattttaatcattttttttcttgagacagaatctcgctctgtcacccaggctggcgagcaatggtgcgatctcggctcttggctttctcttcaaggctaagattgggagatgaagaggaatcacagaagagactaagaagtggtggccttggaggtgggaggggaagctgggagtgcacagtcctagaggctgagaaacgaccatcaggttgggcaggatggagcccttctagtggctgagtgggaacaaaatactgaaaggagaggatcagagagaggacgagagaagagcagccggacccagcgataactcttgggatgttttgctaggaaagggagtgtattctagtcctctctttgcatcctgtaggattggttccaggacgtccctggataccaaaatccacagatgctcaagtttcttttataaaacagcatagtatttgcatatcacctatgcacctcctgctgtatatatacatacatatgtatatatgctgtatatatgtatgtatatatacacatatatgtatatgtatacatacgtgtggctagagtgcagtggcgcgatcttggctcactgcaacctccatctcccggcttccagtgattctcaagcctcagcctcccgagtagcgaagattacaggcacgtgccaccatgactggctaatttttttgtatttttaatagagacggggtttcaccatgttagccaagctagtcttgagctcctggccacaagtgatccgcctgcctcatttttattttttaatttttatcattttctgaatctgggctgcagagaatgtattttttttttttttttactgttgtgatatttttaaccataaagataattgttaaaataataaaataattaaacataggctgggcgcggtggctcacgcctgtaatcccaacagtttgggaggccgaggcagtggatcacgaggtcaggagatcaagaccattctggctaacatggtgaaaccccgtctctactaaaaatacaaaaaattggccgggcgcggtggcttacgcctgtaatcccagcactttgggaggctgaggcaggcagatcacgaggtcaggagatcgagaccatcctggctaacacagtgaaaccctatctgtactaaaaatacaaataaataaataaataaatagccgggcgtggtggcacatgcctgtagtcccagctactcgggaggctgaggcaggagaatcacttgaacccaggaggcggaggttgcagtgagctgagattgtgccattgcactccagcctgggtgacagagcgagactccttctaaaaaaaaatagacaaaaaataataataataatacaaaaaattagccaggcgtggtggcgggtgcctgtagtcccagctactcaggaggctgaggcaggagaatggcgtgaaccagggaggcggagcttgcagtgagccaagatcgcaccactgcactccagcctgggcgacagagcgagactctgtctcaaaaataaataaataaataataataataatttaaaataataaaaataataaatagataaaatatggttttgtttgtttgtttgtttggatagagtcttgctttatcacccaggctggattgcagtggtgcagtcatcactcagtgcaacctcaacctcccaggctgaagcaattctcctgccttggcctctcaagtagctgggaccacaggtgtgcgccacccactggacttattttgttaatgttttttgtagagatgggggtcttgctactttgcccaggctgctctccaactcctgggctccaacaaccctcccacctcagcctcccaaattgttgggactataggcatgagccagcatggctagccagggtttattgttgttgttttttgttgttctttttgtttttttgagacaggatctcactctgttgcccaggctggagtgcaatggcatgatcttggctcactgcaacctccacctcccaggttcaagcgactctcctgcctcagcgtcctaagtagctgggactacaggtgtctgccaccacgcccagctaattttttttctattttcagtagagacagggtttcactatgttggccaggctggtctcgaactcctgacctcatgtgatctgcctgcctcaccctcccaaagtgctaggattgggttttttttttcccctaatgttttccattcgcagtttgttgaatcctggataaggaacccgtggatatggagggccaactataatatttcctgtgactgttgtaaccaatgcccacaaattgggtggcttcaggacagcagaaaacaaaacaatacaactattatatatcaataaaatataatttcaaaacaaaaaccaaaaaacagacatttattttcttacagttctggatcccttaagtcccaaatcagtatcattagccccaagtcaaggtggccctctggaggctctaggggaggatcctttctgcctcttcgagcctctggtggctcccgacattccttggcttgtggctgcatcactccagtttctgccaccattgtcacatggactttttccctgtgtctctgtgtctggttccctttttttctttttcttttccttttttttttaatttttttgagacagaatctcgctctgtcacccagcctagactgaagcggtgcaatcatggctcactgcagcctcgacctcctaggctcaagtgatcctcccacctcagcctcctgagtagctgggactacaggcacacaccaccaagccccactaatttttaaaaacttttttctaaagacaggggtctcactatgttgctcaggctgatctcaaactcctgggctcaagtgatcctcccaactcagcctcccaaggctctgggattacaggtgtgagtcatggtggcctctctattcttttctgatgacattttttctttctttctttttttttcccctcttgctctgtcaccaacgctggaatgcagtggcatgatcttggctcactgcagtctctgcctccccaactcaagtgatctgatcttcccacctcagtctttcaggtagttgggactatggacgcccgccaccacacccggctaatttttgtatttttagtagagacagggtttcaccacgttggtcaggctggtcttgaactcctgacctccggtgatccacctgcctcagcctcccaaagtgctgggattataggcgtgagccaccgcacccggccaggacacttgttaatagatttagagcccattctaattcaggatgatctcatgtcaggattcttcacataaatacaacttcaaagaccctttgtccaaataagatcacacttacaggctctgggggttaggatatgaacgtacatttttggaggactgtcattcaaccaactatagggaggaaagggatggggctggggtggggaggtgacttggtgagccaagtgctttggtgtgaatgtttgtgtccccccaaatttatatgttgaaatcttttttttcttttttctttttttaagatggagtctcatcaccctgttgcccaggctggagtgcagtggtgcaatctcggctcactgcaacctccatctcctgagttccagtgattctccagcctcagcctccggagtagctgggattacaggcgcctaccaccatgcctagctgatttttgcatttttagtagggatggggtttttggcatgttgcccaggctggtcttaaactcctgagctcaaagcaatctgctcactttggcctcctaaagtgctgagattacaggtgtgcaccaccatgcctggccaatatgtgttgaaatcttaacccccgaggtcgtggtgttaagaattggggcctatgggaggtgaggagggtggagacctcatgaatgggacctgtgcctttacacaagaggctggagagagacctcatgccccgtgagattagagggcgagaacgctaacatctttgtctataaagagagcctggctgggcgtggtggctcatgcccgtaatcccagcactttgggaggccaaggcaggcagattacctgaggccaggagtttgagaccagccagttcacccatagtgaaaccctgtccctactaaaaatacaaaaattaactggtatggtggtgcatgcctttaatcccatctactagggaggttgaggcgggagaatcacttgaaccctggaggcagaggctgcagtgagccgagatcacgccactgcaatccagcctgggcaacagagtgagaccctgtctcaaaaaaaaaagaaaaaaaaaagtctcaatgccggaggaatggaagactgtgctcaggaacaaaagtcctcaagtttctggccactccccacgccattccccaggaccccagcatcccctgcccccactatccttggctccatgactgttctcccaggtcagagcccgcatcacactctttcaacctccagaagtttgataaggaagtctctctacctgattggccttccctcccacaactccctctgtctgcctatccttaaagtagcagccagggtgacccttctgaagggggcttgggttatgccaagatctcttcttccttcccctcccctcccctcctcttccctcccctcccctcccctcccctttccttcccttctcttctgacagagtctcactctgtccctcaggctgaaatgcagtggcacaatcttggctcactccaacccccgcctcccaggttcaaggaattctcctgcctcctcctgagtagctggcattacaggcatgagccaccacacccggctaatttttgtatttttggtagagacggggtttcaccatgttggccaggttggtctcgaactcctggcctcaagtgatccacccacttcggccacccaaagtgctgggattacaggcatgaaacaccatgcccagccttcttttctttttgagatgggacctttttcagtggcccaggctggagtacaatggcatgatcatagctcactgcagcctcaaattcttaggtccaagtgatcctcttgcctcagcctcccaagtagctgggactagaaggcatgtgccaccacgcccagctaatttttaaaattttttttagagttggtggtcttgctatgttgtccgggctggtcccaaactcctggcctcgagcgatcctcctaccttagcctcccaaagtgctgggattatagttgtgagccaccatgctcagcctagccctgccaagatccgttttccattcccatggcactcaacactctcctcagagcagtttccacaattgtaattacctagtttggcagagtgatgtcttaatgttgctctctctgcttctagaatgtgagcccccagagaggtcagggcctgggagatttattcatttacatatcccacgcacctagtcaggcatagcacacagtaagtacttaatatatgtgcccaggaggttttcaaatgaatccctttcggccaggcacggtggctcacgcctgtaatcccagcactttgggaggccaaggtgggtagatcacttgaggtcaggagttcacgatcagcccggccaatatggcgaaactctgtctctactaaaaatacaaaatttagccgggcatgctggcgggcgcctgtaatcccagctactcaggaggttgaggcaggagaatcgcttgaaccagggatgtggagattgcagtgagctgggattgcaccactgcactccagcctgggcaatagagcaagactcagtctcaaaaaaaaaaaaaaaaaaaaaaaggaatcccttttgtccaggcaagcggggtgcactggttctctgaccagcaattccccaactggacgggtcacttggtgtcccagtggaatattcgggaatcttctctgaggcaacgggacacacacacacacacacacacacacacacaggcacaatcacacacagacacacacaaaatgaaccccccctcctcaatttctttaccaactatttttcccccaggcagaaaatgaaccattattaaaacaacacggcaaccggccgggaaaacccattcacagcgatttatatcgcgtcgccgcggctgccgaaaggaaatgggaggagaagctcgaggtttaagcgctgggtgaaaaatcacattccatcagaggaagaacagatgggtgtttttttcctcccctttctcccccttgcttgggctcggagtcaggaatctatgtcagccgtgggtttgttcttggtgtgatagggtgattctggggagacagaggcccagccaggctgctgggtcccagggagcaaggggtggcttgtgagccactgaggacccccgctccgcatcctccatcctcctccccaccggctctgtctcctgggcctgtaggctgccgatctgagccccatcccccatcctgctattttaatttttacattttctcatcaccccctggaattaccgtctctccttatttccttcctccttcacagtctttttccttgaaggcagggccatgtctgtcctgttcgtcgttgcatccttagtgcattgaacacatagcagtggctcccatatctgcagacaaccactaaccctctgccacattcccaccatcacgcctgccatcctatcctaaccttactaaggacaccttcccccactcgccggcgggctgtgagcgcgctggaagacgggggctgtttagtttgtttccttcatggatggatctactgtccctccacccccaaagaaagcctgattcacagctttctgggtgttgggattgggggatggggacagacaggcatgactgagtcattcagctgtttaaaagctatcactgacttcttcaaaattgaaaaatgttatcgtggctccaacctagacccaaaacacctgttcagtttaaaccaccccacccccgccccgcgcctgcccccacaaacatgctggcacccgcctaggcaccacctagtcaaaccccctggcccatgtggtccccaactcacccatgatgctttgcatcgccttcaccaaatgccccgcccctccctctgtgtccaccccagagctgaatccagcccacagatgtaattggcttggtccatgcagggtttaaaaacattttgtaatgacttgctagctcttatttatttatttatttatttatttatttatttatttatttatttttgagatggagtcccgctctgtcgcccaggctggagtgcagtggcgcgatctcggttcactgcaagctctgcctcgcgggttcacgccattctcctgcctcagcctccctagtaactgggactacaggcgcctgccaccacgcccggctaattttttgtatttttagtagattcggggtttcaccgtgttagccaggatggtctcgatctactgacctcgtgatccgtccacctcggcctctcaaagtgctgggattacaggcgtgagccaccgtgcccggcccatgacttgctagcttttaaatataggctgctttttcattgttgttgttgttgttgttgttttagagatggcgtctcgctgtgtcgcccaggctgtagtgcagtggtgtgatctctgctcactgcaaacctccgcctcctaggttcaagcgattctcctgcctcagcctcccaagtagctgggatcacaggcgaaggccaccaggcccagctaatttttttctatttttagtagagacagggtttcaccatgttggtcaggcggccttgagctcttgaactcaagtgattcgcccccctcagcctcccaaagtgctgggattacaggcttgagccaccagtgccagacctcatgtgatttttgcataaaaatctggatgcctgacttctcctaaagacgaaaccttgtctgggcgtggtggctcatgcctgtaatcccagcactttgggaggcctagatgggcagatcacctgaggtcaggagttcgagaccagcctggccaacatggcgaaaccttgtctctactaaaaatgcaaaaattagccaggtgtggtggcacgtgcttgtaatcccagctactcaggaagctgaggcaggagaattgcttgaacctgggagacggaggttgcagtgaaccgagattgtgctactgcactccaacctgggcgacatagcaagactcgtctcaaaaaaaaaaaacaaaaaacaaaacaaccaaattaactgaattaaatgagctcatgctatataaggaacaggcttagcaagtgctgataaatgttactcattcttatcattatttgccatagtctcaaccttccttactgtgtccctgacactgaagttgttccattgctggtgcagtcagtctttttatcttggctgcttggcatatttatattacctactgtctgtccctgtaggtttgtggcatgcttcagctcagttctgggtcatcacctctgctataaagaggttccccagtctgggcacagtggctcaagcctgtaatctcagcactttgggaggccaagacaggaggatcgcttgaagccaggagctcaagactagcctgggcaacatagtgacaccccatctctacaaaaaataagtaaataattagctgtgcatggtagcatgtgcctgtagtcccagctactcgggaggctgaggcaggaggatcgctttaacccaggaggtcgactgcaccactgcattctagcctaggtgacgaagagaggccctgtctaaaaaaaaaagaaagaaaaaaaggctctctggtcttccacctcactgcccatccgtttctcaacactccccattttcgagtttccctccccctccactgtaccgcgggcccctccagatgcttcatcaagtgctcgtggaattggatatcagggcctgtgttcatttcctggggctgctgaaatacattaccataaactaggtggctggaaacaacaagaatttattatttcaccattccggaggccagaggttgcaatcagggtggtgcagggctgcaatccctccgaaagcactaggtgaggattcgtcctttcttcttccagcctctgatggttccttgcttgtgtctgtactgctgcaagccctgcctgtcttcacttggccttcttctctgtgtctaacccccttctcttctaaggtcatttatcattggatttcgggccaccctaatccaggatgatctcattgcaaaatccttaacttaattacatctgcaaaaacgctttgtccaaataaggtcaccgctatggtttgaatgtctgtgtcccttccaaatccatatgttggaagagttggggttcttgggaggtgattaggccaagagggccccattctcatgggtgagattattgcccttataattgagtgtgacagtttggagatttctcaaacaatttaaaattcttctattttatttgacccagcaatcccattactgggtatatactcaaaggaatataaattgttctactataaaaacacatgcacatgtatgttcgtcgcagaactattcacaatagcaaagacttggaatcagcctaggcacccgtcaatggaggattggataaagaaaatgtggtgcatatgcaccatggaatactatgcagccattaaaaaagaatgaggccgggcatggtggctcatggctgtaatcccagcattttcagaggccaaggtgggtggatcacttgaggccaggagttcgagaccagcctggctaacatggcaaaaccccatctctacaaaaaaatacaaaaattagcggggtatggtggcaggtgcctgtagtcccagctactcgaggggctgaggcaggagaattgcttgaacctgggaggcggaggttgcagtgagccgaggtcacgacactgcacttcagcctgggtgacagaatgagactgtctcaaaaaaaaaaaaatagaatgagatcatatcctttgcagcaatatggatggagctggaggccattctcctaagccaactaatgcaggaacagaaaaccaaataccacatgttttcacttataagtggtagctaaacactgagtacacatggacacaaaggtgagaacaacaggccaggcacggtggctcacgcctgtaatcctagcactttgggaggctgaggcaggtggatcacttgaggtcaggagttcgagaccagcctggccaacatggtgaaaccccatttccactaaaaatacaaaaactagccaggcgtgctggcacatgcctataatctcagctactagggaggctgaggcaggagtatctcttgaacctggaaggcagaggttgcagtcagccgaaattatgccagtgcactctaccctgggcaacgaagcaagactccgtctcaaaaaaagaaaaaaaaaaaaaagatgggaacaacagacactggtgtctgtttgagggtggaaggtaaaaggagggtcaggattgaaaaactacctgttgggtgttatggtgattacctgggtgacaaaattatctgtataccaaactcctgcaacacgtaatttacccaaataaaaaacgtggacatgtgccccttgaacttaaaacaaacattggaaaaataaataaataaataggccaggcacagtggcatacgcctgtaatcccagcaatttgggaggccgaggcagacggatcacttgagctcactagttcgataccagcctggacaacatgacaaaccccatctctacaaaaaatacaaaaattggctgggtgcggtggctcacgcctgtaatctctgcactttgggaggtcgaggcgggtggatcacgaggtcaggagatcaagaccatcctggccaacatggtgaaaccctgtctctattaaaaatagagaaaattagctaggcatggtggcaggtgcctgtaatcccagctactcgggaggctgaggcaggagaatcgcttgaacctgggaggtggaggttgcagtgagctgaaatcacaccactgtattccagcctggtgacagagtgaggctctgtctgaaaaaaaaaaaaaaaaatcagttgggtgtagtggtgcgcacctgcagtcccagctgctccctgggaagctgaggtgggggaatggcttgagcctgggaggtggaggttgcagtgagccgagatcgcgccactgcactccagcctgggtgataaaaccagatcttgtctcaaataaacaaataaataaaataaaaataactcgcttggccaggtgcggtggctcacacctataatcccagcactttgcgaggctgaggtgggtggatcacctgaggtcaggagttcaagaacagcctggccaacatggcaaaaccccatctctactaaaaatacaaaagtcagccaggcatggtggcacacacctgtaatcccagctactcaggaggctgaggcaggaaaatcgcttgaacctggggggtggagtgggctctcaccagacaccaaatctgctggtgccttgatcttggacttcctggcctccagaactgtaagcaatacatttctactggctgggtgcagtggctcacacatgcaatcccagcactttgggaggccaaggtgggcagatcacctgaggtcaggagttccagaccagcctggccaacatggcaaaacctcgtctctactaaaagtacaaaaattagctgggcgtggtggcggttgcctataatcccagctacttgggaggttgagacaggagaattgcttgaatccgggagaccgaggttgcagcgagccaagatcgcgtcactgcactccagcctgggtgacagagtgagactctgcctcaaaaaaaaaagaaaaagaaaaaattctattacagttgacttttgaacaacatgggcttgagccataactgcctgagtccccttgtaagtggatgttcttccgcctctgccacccctgagacagcccctcttcttcctcttcctcctcagcctattccatcggaagactcgtggatgaagacggttatgataatccacttccacttcatgaatagtaaacacattttctctttctcatgattttcataacatttcttttctctagcttactttattctaagaatattgtgtgtaatatatagaacatacagaatacgagttcatggattgtttatgtcattggtaaggcttttgatcaaccataggctatcagtggttaagtttttgggaagtccaaagttatatgcaggccaggtgcggtggctcacgcctataatcccagcactttgtgaggctgaggcaggaggatcacttgagccaggagttcaagaccaccttgggcaacatagcgaaaccctatctctacaaaaaatatgaaagttagctgggtgtggtggtgtgtgcctgtggtcccagctactcgggaggccttaactttcttcttttttgagacggagtcttgctctgttgcccaggctggaatgcagtggcgccatcttggctcactgcaagctccgcctcccgggttcacaccattctcctgcctcagcctcccgagtagcggggattacaggtgcccgccaccacgcctggctaatttttgtactttttggtagagcagagtttcaccatgttggccaggctggtctcaaactcctgacctccagtgatctgcctgcctcagcctcctaaagtgctgggattacaggcatgagccaccgtgcctcgcctccttaattttctttctgtctctcttcactcattcagttttttattttattttattattttttgagtggagtctcgctctgtcgcccaggctggagtgcagtggcacaatcttgggtcattgcaacctctgcctccagggttcaagcaattctcctgcctcagcatcccgagtagttgggattacaggcacctgccgccacacccagctaatttttgtatttttagtagggacagtgtttcactatgttggccaggctggtctcaaattcctgacgcccggtgattcgcctgcttcagcctcccaaagtgctaggattacaggcgttagccactgcgcccggccatcattcagttttttgaagccaatggagactcagaccctgcacccccagctgtgcccccagaagcccgctgtcttctctcttccttgcacccacgggaatggctctccctccaggagggatgggtaggggcaaatgccaccccgtccgccctttgttaccagggaggccgaacccacctctcttcacactgcagaagaactcgggtgggcgcccccactttcccgcaagctcgcagagagcatcctccgcccacccggcaagcaccacttcatcacgccaccgccagggtgtcaggcggggctgagcggttgtcatttctctctaacccgtcagaactctgcacttccttgacagttcgctggctggcctccgacccgtagctgatttctttccagggctggcaggttgggttaagagggagcgctcccctgagccgagacttactttcttttgcctccaagttgcttcatcccccacccttcaccaagaacgcccacaactcctggatggtgcattaccctcccacccctccaccccgtccccttcctttccctccattcccaaatgacggcagccctggggccaaactggccccagatgtgttgtttggcctgtatggttaactccttgtttttaaaaaattcctttttaaaaaaaaattaaaaaaaaattttaaattcctttttggaataaaattcagttaacataacactcgtcattttattgtatattatttttagaaacagaatctctctctgtctccccgggctggagtgcagtggtgcaatcatagctcacggcaacctcaaactcctggggtcaagcgatcctcccacctcagcctcccaagtagctgggattacaggcaggctccacgttgcccagctaattaaaaaaaattttcgcccggcactgtggctcacgcctgtaatcccagcactttgggagactgaggtgggtggatcacctgaggtcaggagttcgagaccagcctggccaacatggtgaaaccttgtctctactaaaaatacaaaaatcagccaggtgtagtggcacgcgcctgtaatctcagctacttgggaggctgaggcagaagaatcgcttgaacccgggaggcagaggttgcaatgagccaagattgcaccactgcactccagcctgggcaacagagcaagactctgtctcaaaaaaaaaaaaaaatttgtagagctggggtcttgctatgttgcccaggccggtctcaaactcctgggctcaagcaatcctcccacctctgcttctcaaagtgtttgttaggattacaggcatgagccactgtgcccagccaagattaatcgtacatttttttgtttttgttttttgagacagagtcttgctgcgacacccaggctggagtgcagtggtgtgatatttgctcattgcaacctctgcctcctgggttcaagtgattctcttgcctcagctttctgagtagctgcgactagaggtgtgcaccaccatgcctggctaatttttgtatatttagtagagatagggtttcaccatattggccagaatggtcttgaactcctgacctcaagtgatctgcccgcctcggcctcccaaagtgctgggattacaggcatgagtcactgtgcctggccccaattgtacattttaaaatgtacaattcactggacttttgtatactaaaagagttgtgcaactatcacgtctaattacagaacatttccatcacccccaaaagaagccctatccccactagcagtcaatctccattccccatcccccatcccctggcaatcaccaatctgtttctgtctctatgtgtttatctgttttgggcatttcatataaaggaaattatatactatgtgaccctctgtgtctggcttctttcacttttccaaatgttttcaagggtcatccatgttgtagagttaatgcctttatggtgaaacacataaatcttaggggcacaggtctgtggatttttgaaatacatttcacccttatcactgtcacctagttcaagatcaagaacattccagtctcccaggaggctccctgggctattttccaggaagtgggctgcctcaaaacatcactaagccagtggcttttttttttttttttttttttgagatgtagtcttgctctgttacccaggctggagtgcagtggtgctatgtttgctcactgcaacctctgcctcctgggttcaagcgattctcctgcctcagcctcccacgtagctgggactataagcacacaccaccacgtctggctaatttgtttgtatttttagtagagacagggtttcaccatgttggccaggctggtcttgaactcctggcctcaagtgatccacctgccttggcctcccaaagtgctgggattacaggtgtaagccaccacgcctggaccagtggctcccatctgatggtgattatgcccctaacaacagacatttgtcacaactggggggtgctgctggtatgtaatggttggaggccagggattctgctcaacatcctacagtgcacaggacagcccccatcaagcagaatcatttagccacaaatgtcaatgaggccgaagttaggaaaacctgggcttccccaactcttttcataggttacttctgcctggccttgaacaatacaggaatgaaatcactcagggtattctctttgttatcttgcttctcctactgaacattatgtctctggtattcatccatgctgtgaatgcatcagtagtttattctttttcattgctgcgttatattccattatatgaatgtcctcccatttcttttccatttgccagtcgatggtcaacttaaggggtgtctggtgtttggcgatcatgaatgaagctgctaggcacatccatggatgtgtctttaggtgaacctaagctcctgttcccactgggaatcaacccaggaatggaattgctgggtcgtagcaatttaactttagtagatccccatgggatatttaaagctcagggaattttgtgcaacaactgtgatttctggcttctcttgaagaagctattctggcaacattgagcctgagttcccacgtggtagcgcacagctggagctgagtggtagcaagcgggtgcccatggaaaaggggggggtggtgcaacttcagctaccctgtccttcaccactgcctcacacctgcccaaattctgcattttcattccctggtcagcatttggctttgtgtcccctgaaatgagctcatgcaaggttaggagtcaccttctaccttcccatggccatcacctctacctctctgggacccacctataacccctcactcctattcccaacccccttcccaacctatctccattccacagagcctgcaagcccccacatccaccttaatcccaaacacaggatccctttagagctggcaggcatttctgggttgccgcagaccccaccactccctatcacactattgcagcttggatactgccggcttttttcttggtaacagcctcagagcctccatatgagtggtcgtctctgcccagatcaccatgagggggactgctatttaaagccagcaggtccctgcctcagtttacctgtcacttccccagggctgggaagccttctttgtgccgggactggccagtgccgggactggatctgtctcattcattgctgttttaccactcaattcattacacaatgaatcctggccctgaggcttgaaggagagagaggcagagtcagtgccaggttgaataagccacttactggccacacgttctgcagaagctagctggtgaacttgccaggcacatcgcactcctcaaagggggagtccctccccgttgctggtccgagggatctgggtctgagaaatccctcttcctccccagaacacactggccaagtccaagtccagcaaagcttagggcttcttccctgggatcctcaaccccacaggccaatcccacccctcaatcgtcccggtcttttccatgcatggtccaaatttcctccagtggagccaccagggcaaggccttccgcctgccagactttcccggactccccagtttatcacccatcttcccgcacctccctcaaccctccgctcctctctccctaacaccgggctgtctcctcaccttctcacacctcccaacctccctacgcatttttcccttcctttaagcagtccccatctcaaacacgctcagctctctcccttcacccccactttgtcccctcacaccccaactcccccagctctgcgctcttcacccccctcccttccccgggctgcccctcctgagcacctgggaagaagaggcggggccccctcacctggcggccgcagagcagcggggaaacggcccctagcggccggggaaggaagcgcagcccagccgggctccccttccagctggtgcctaactaggaatccgcctccacttaaacgcccgcctgctgctcaggctggaacccggcggcttccgggattctcgctttcctccactcccccgctttctcctgagcgcctactgtgtgccaggatctgtcctaggctccgggtagacagcagtgaacaagaaacaaacatccctggactggggagttggtattctagtgagggagatagataaatgaatgaaaacgaaactaggtcaggatatgctgtggggactaggagttcgagaccagcctggacaacatagtgagacccccccccccccagtctctgggactggagagagataaaggggagaggagatcaagggagtgaggagggtgggggtgtttgcagttttcttttttcttttttttgagacagagtcttgctctgtcgcccaggctggagtgcagaggtgtgatctcggctcactgcaacctccacctcccgggttagagcgactcttgtgcctcagcctcctaagtagccgggattacaggcatgtgccaccacacccagctaatttttgtgttttgcattttcttttcttttttcttttttctttttttttgtgacggagtctcgctctgtcgctcaggctggagtgcagtggcatgatctctgctcactgcaagctccacctcccgggttcacgccattctcctgcctcagcctccctagtagctgggactacaggcgcccaccaccacgcctggctaattttttgtatttttagtagagacggggtttcaccgtgttagccaggatggtctcgagctcctgacctcgtggtctgcccgcctcggcctcccaaagtgctgggattacaggcgtgagccaccgcgcccggtcctgtgttttgcattttcaatagagtggtcaggaggtaacatataagcagagttcaaggagggtgcaaagtaaggggtcctgttgactctgcccctaagacatgccgaaaacctaacgttttcccccagcatcccgttctgggcctccatcacctgcctctcacctgcatgacagtggtgatcacctcacgaatctcctgggtccctctcaaattgactatataatttatttatttagagaccaggtctcgctatgctgcccaggctggtctcgaactcctgggctcaagcgatcctcccgccttgacctcccaaagtgctaggattacaggcatgagtcactgcgcccggctgacctgtataattaaaaaataataataatctataaataatatatattttttaagagataggagtatcgctcggtcacccaggctggagtgcagtgttgcagtcatagctcactgcagtctctaactcccaggctcaagtgatcctcccacttcagcctcccaggtaactgggattacaggagcacaccagcattcctatcattttctttccttccttcctcccttccttcttatcttccttccttccttttttttttttttttttttggcatctcactctattgcccaggctggactgcagtggtgcgatctcagctcactgcaacctctgcccctgggttcaagtgattctcctgcctcagcctctggagtacctgggactatgggcacgtgccaccacgcccggctttttttgtatttttagtagagatggggtttctccgtgttggccaggctggtctcaaactcctggcctcaaatgatttgccagcctctatctcccaaagtgccaggattacaggtgtaagacaccgtgccccggcccctagcattttttttttttttgaggcagtctcactctgttgcccagtttggagtgcagtggcacaatcttgggtcactgcaacctctgcttcctgggttcaagcgattctcctgcctcagcctcccgagtagctgggattgcaggcgcccgccaccacgctgtaggggtgggttgcccctccacacctgtgggtgtttctcgtaaggtgggacgagagatttggaaaagaaaaagacacagagacaaagtatagagaaagaaataaggggacccggggaaccagcgttcagcatatggaggatcccgccagcctctgagttcccttagtatttattcatcatttgtgggtgtttctcgaagagggggatgtgtcagggtcacaagacaattgtggggagagggtcagcagacaaacacgtgaacaaaggtctttgcatcatagacaatgtaaaggattaagtgctgtgcttttagatatgcatacacataaacatctcaatgctttacaaagtagtattgctgcccgcaggtcccacctccagccctaaggcggtttttccctatctcagtagatggagcatacaatcgggttttataccgagacattccattgcccagggacaggcaggagacagatgccttcctcttgtctcgactgcaagaggcattccttcctcttttactaatcctcctcagcacagaccctttacgggtgtcgggctgggggacggtcaggtctttcccttcccacgaggccatatttcagactatcacatggggagaaaccttggacaatacctggctttcctaggcagaggtccctgcggccttccgcagtttttgtgtccctgggtacttgagattagggagtggtgatgactcttaaggagcatgctgccttcaagcatctgtttaacaaagcacatcttgcaccgcccttaatccatttaactctgagttgacacagcacacgtttcagagagcacggggttgggggtaaggttatagattaacagaatctcaaggcagaagaatttttcttagtacataacaaaatggagtctcctatgtctacttctttctacacagacacagtaacaatctgatctctcttgcttttccccacacacgcccggctgatttttgtagttttagtggagacggtgtttcagcatcttggccaggctggtcttgaactcctgaccttgtgatccacccgcctcggcctcccaaagtactgggattacaggcgtgagccaccgtgactgccggccaccatttttaattgagctaaaattcccacaacaaaaaattaaccaccaaccattttaaggtggacgatgtcatgtcatgtcatagtacattcatcatgtctagttccaagacatttttcatcatccccttaagaaaactcacacccgttagcagtcactccccattccctcctcccccagccctgggccacccctcatccgctttctgtctctctggatttgcctgttctggacatttcatataaatttcatataaatagaacatataatggtacactatgggaacttttgtgcctggcttcttttgagcatggtgttttcaagtttcatccctgttgtagtgtgtaccaggacatctttccttttaatggttggaaaatattccattgtatgaatatacattttgtttatctgttcatctactgataaacatttggattgttttcacgtttttactatggtgagtagtgctgctaggaacatctacatacaagtatctgtttaggaggctgttttcaattctttcggttatacttaggagagaaattgctgaatcatacagcattttttttttttttgagacagggtcttgctctgccgcccaggctggagtgcagtggtgcaatcatagctcactgcagcctcgacctcccaggctcaaatgatcctcccatttcagcccccgatcctgagtagctgggactataggtgcaagccaccctgcccaggtaatgtttgtatattttgtagaaaccgtgtctcactatgttgcccaagctggtcttgaactcctggactgaaacgaacctcccatcttggcctcccaaagtgctgggattacaggcgtgagacaccgtgccctgcctcatatagtaattctgtgttatagttattgagggagcactcatataatcttttattttatttatttatttatttatttttatttatttgtttttttgagacagagtctggctctgttgcccaggctggagtgcagtgacatgatcttggctcactgcaagctccgcctcctcggttcacactattctcctgcctcagcctcccgagtagctgggactacaggtgcccaccaccacgcccggctaattttttgtatttttagtagagacggggtttcactgtgttagccaggatggtttcgatctcctgacctcgtgatccacccgcctcggcctcccaaagtgctgggattacaggtgtgagccaccgtgcctggcctattttatttattcttattttaacattttgttttagagacagggttggggggttttagagaggataggttgggggcggggaataattccaactgtggtctttttcttttctcaccctgttgcccaggctggagtgcagtggctattcacagacgtgattccactactgatcaacacaggagttttaacctgctgtgtttccaacctgggccagttgactcttccttaggcaacctggtggtcccctgctcttggggggtcaccacattgacgttgatggtcatggcacacaccacctcccggaagtcctaggatcaagcctgtgtgcgtgaatcctcctgcctcagctaggatacaggatcacaccaccaagcccagccctataatcttttaaacatccaaataagatcatgccacccacttctgaaagccctcttggggttcctagtatcactgggaatataatctagaccctctcctggcctcccaccatgctagcctagccctggtgcctttcaaatagtcctgcctagctaggcgcagtggctcacacctgtaatgccagcattttgggagaccgaggcgggaggatcgcttgagcctgggagtttgagaacagcctgggcaacattgtggaactctgtctctacaaaaatacaaaattagccaggcatggtggcatacgcctgttgtcccagctactcaggaggctgaggcaggagacttgcttgaacataggaaacaggttgcagtgagctgagattgagccattacactccagcctggacaacagagtgagaaaagaaaaagaccacagttggaattattccccttccccaccctatcctcccagcccaaatccgggacccggctcggaacctaacttttttttttttagacggagtcttgctctgtctccaggctggattgcagtggtgcgatcttggctcaccacaacctccagctcccggattcaagtgattctcctgcctcagcctcccaagtagctgggattacaggcacgcgccaccatgcctggctaattttgtatttttagtacagacagggtttctccatgtttgtcaggctggtctcgaactcccaacctctggtgatctgcccacctcggcctcccaaagtaatgggattacagacgtgagccactgcacccggcctataactacattttttaactacttgggcatgttctggagccttcgttgccccttctgtaagatggggagaaagtcccccacccacagagttaccataaagtataaatgagagcattcgtgctcatttgagccatttctcggccagcctgaacctctccccgggcaccaacttcatgcctccacttggacatatcaaaccaaaggcttggatctaacctacaaaactgccccctctccatcctctccatccttccaggggctcactcagctcacaaattttgacttacctctttccctcgtatcccacttccaatccatctgctccaccttcaaaatataccccctgaggacgggcgcggtggctcacgcctgtaatcccagcactttgggagactgaggtgggcagatcatctgaggatgggagttcaagaccagcctgaccaacacggagaaaccccgtctctactaaaaatacaaaattagctgggcgtggtggtgtgtgcctgtaatcccagctactccggaggctgaggcaggataatggcttgaacccgggaggtggaggttgtggtaagctgagatcacaccattgcactccagcctgggcaacaagagtgaaactgcgtctcaaacaaaacaaaacaaaaaacaaacaacaaaaaaacctggctgggtgcagtggctcatttctgtaatcccagcactttgggaggctgaggcgggcagatcatttgaggtcaggagttcaagaccggcctggccaacatggtgaaaccctgtttctactgaaaaaaaaaaaaaaaatcaaaaattagcctggcatggaggcgcattcctgtaatcccagctacttgggaggctgaagtaggagaatcaattgaatctgggaggcagaggttgcactgagtcgagatcatgctactgcactccagcctggatgacacagagtgagactccatctcaaaaaaaaaaaataaaaataaaataaaataaaataaaataaaagaacacagttggaattactccctgcccccaacctatcctcctagcccaattctgggacctcttcatcttgccctccacttggcttggcagtgggggtggaactgaatggagctcagaaatcgcccaaggttggcctgccaccacggctcacacctgtaatcccagccctttgggagacttaggaaggaggatcatttgagtccgggagtttgagaccagtctgggcaacatagcaagctatgaaaaaaaaaaatacaaaaattagctgggtgtggtggctcgtgcagtgagctgcagtgagctatgatttcatcactgcactccaacctgggcgacagaaagagaccctgtctccaaaaataaataaatagtgtggcgcggtagctcacgcctgtagtcctaacattttgggaggccgaggtgggcggatcacttgaggtcaggagttcgagaccagcctagccaacatggtgaaaccctgtccctactaaaaatatgaaacttagccggaaatcacttgaacccgggagagggaggttgcagtgagcagagatcgtgccactgcactccagcctgggcaacagagcgagactcctcaaaataaataaataaataaaaatataaataaataaataaaagaagttgcctaagatgggggtacagggagcctctggaaaggccagggacacacaaaacttcacccacacctcaaggcttggataggtccatcctccactccctggcacctgctgactttccagggctcattccatcacacattctgtgtccatcttctccatgacgaaggaagcgcccagagaaggctccctgccttgttccctgtgcactggaggcacatcctcaatgcatcacactgcacctgacaggtaagggcatataaggtgcgtgctgtgtgtttgaggcgtaaatggaaggaatgaatacgtgcacggagcagtgaaatgaacagcagggttgtgcatcctataccgagtgggctctaggaaaacacgggctgggggcgcctggtgggcagtggctgtctggcgttgcgctgacctgtccaggagcctgaggcagggcacccgggaacgagggcgctgggcctgaggcaaagggaagctgagcactggggcgaagcagagccttcaggactgtgaggttgggggcccaaccgaggcagtgggcgcaatacatggaaggcacagagaggggacagacaaggcataggcgagcccagctgtgtctgacgctgggatgctggaggtgctaggcgtacaaaatgtggggtcccagatacgcaggagaacacagggtgccctaggcatagggcaccctgggcgtgcgggttctatagcacagggtgcacagaagatggggcgtccaggtgcagggttcatagaacatggggtactcgaggcgcgtggcaccgtgggcgtggaggtcccgtgggacggaatacacagagcgtggggtgtctcaggcgcggggctcatgggaatcccaaggcgcaaggtgggaggctggaagcgaggagcgccctgggagcagggtgtccgaagcgcgggtaccgatctgggcagcgcggggcacgcggcgcgcgggcgagtctgcgtgcgcgcgcggacgccttggttcccggagcccagttgctggcgcggcctccactgcggctgcgaagccgaaggtctgaggtgcgccagggctctttacgcggcccccagcctctccgcaccctttgtctcctgagcacgccgctcacaagtccaggagacatggatcagatggaggctggagagccgatcccagctgggaccagtggggtttagagggtctagaaaggggtgaggggcgagggtgagggggttctggctggggttttccaaactgagctgagggtgccttaaagaatgtcgttgctttccctcatataagtaaaggccactccttctcgtagcctctggagagtgcaagttagaaccacctcctaggctagctctgtagggggaagtgggtgggctgctcagggctggagggtggggtggggacaaaggcctggagcaagagaacaaggaggtgacaagcttttcctgagcgtcaagttctgttcccttttcggtactgctaggtttatagaaagctggctgcctggagtgccctccatctcaaagccttcatgggtcttacttgctactgtcagtatctcaaactgggaaattgaggcgtagagagatgggatgccctcctccatacccagtgggtctgcagtcaaccacagatggatgggatctgttttgcactcaccaactcctactttatacccctttggtcccccagatccaggtgtccagcctggccacccagattcaaggctggacagctctgcagccatgaaatcctgggcatgaaggaggaacgaaagtgacccatccctccattttgaagttctctggggccagatttgcctaggttctggctttcaagaatcccttcccagtcatgaaaagacagctgtccatagaaggcggtggagggtgacaggctgccacagctgtggtgcgtggtcacctgggcagcctggaagtctggtgtccctgcccttcctccagtttagccacagcgacgtgcttctaggaagggattcttagaggccaagttaattcccgtgcagcctatcaattcaggctttcttagatactcatttttcccatccagatatgcctcaagttttgtggatttaccactcctactcaggaacccttttccctttcctcattcattctgcaaagcgcctggttagcaatgcactctcttccctggacatgtagggaatgggggtttcccccatccccatcctcagcccgtccccctcctctaaaactcagatcagggtttgtctgccctgctgctaagatgcagcccaactttgaactttgagctgtctgctttaacatttgggcctcacttgaatggattcccttccctgaggattccaagccctccccagccatcagtcttcccatctttcataaaatggagccagcagccccgcttcagggactcccccctccccctgttccctctacgccaggattcttcccccgacttccatttccctccagcccccaccctgcacaaagttgcctgttctgccgaagtgcctatttttggcttggggcccagttttatagccccagctataggtcttggcagtcacaactttcgctctccagacagccaagccgggtccaacagccttccccaccccagagagggggtgcgggggctccctctgcagcctcaacccgaaacctgcccctcgccttacttggtctgatgcctgggaacccaagcctgcttcttgccctacttcttagagtccaccagctgcaatggagttgttaggtgttgaaaatccatgccgggtttttactctttcagagaacataaaattcaatttttctcctcgcaccccctccccaaaagcaagactttgaggcgtttatagatacaaaccttcccctaacgcttccctccgcccctgctacccggtcagctccaagcccctgtcccggtggcccaggatcttctgctaagggtctcattccgtcccgcgctccagtcctggcttggcgtgcctccctcgccttttattgtaggtctggtctcccagggtagcggcctcatcgcattcccttcgcagcgcccctggatccagaaaccgcttttacctgtccgctccggtgcagccagcacgccgaatcccgtcgtacccgagtccagccctccttttgcccctcccccttgcacgtcgctgccaggaagatgagggcagcccaagtcgcctcagccactaagcatcccccttccagaactccccccatgcgaacccaggtcccgggagttccgggctgggtcttgcttgttttcactgcgttaggcctgacgcattactccgtctcccaagaaagaatccggcccgaaatttgcgtgccccgggtgcgtttggccatgtcgcatctaccccccaaccccccgctccaacaccgtttctcccatctttatctaatccaactcgggttttgcacaacccttccagatctccccatttgcgccctccttccccgggctcggcgcctttccttttacttcactggaaaatccgctccgggtcttccttacgcctgtctcccttccccgactccccgctccaacgcgggggtccagcacgtcgctttccctctctctgcttttccagggaggaggcgagaggaggcgaaaggaaggaaactccagcacgggttttcgggccggctcctggggcgctcaagcgggttgcggcggccagtcccgggcggcgactccgggccggattttgcgcgcgcccaccgcccccctcccggagcgggtgcgccggggagaggggagagctggcggcttgtcattgctggttcccggctccggctcggtccgcgcgtcctgcggtgcccacgggcccggcctggcgcccccccctccggccgcgccgcccctctccgccagctccgcgccgcccgcccccaacccgagctccccgcggccactgcggggagcccgagccgtcggcgcgggagctgtcggcgctgcggtgcccccgccccgccgtctgccgaggaggccccggctgagggggccgcgcgggccccggagcggcgccgccgagcggcgggggcctgcaggggcgcccccgctgccccgttaacccctcgtccaccgccgccgtcggagggggctgggaagtcgcctgggcacacacgtgccgcctccgttggggccgcggagctgcgggggagatgcgggccgctgccggcgccgcctcggggcgctccgcctcgccccagcccccggcgctctgacgccgcccccgccccacagcctccctccccgggaggggcgcagacccgatcgcccccagtcccgagcctccgccgccgcgagggggccgcctttggatccgtgtaatccgcctctttttttctattttctttttttttttttttttttttttctaatttttggttggtggcggcggtgctgggccaggggaaggaagggacacggaggccgccctcgccccgccacctcctaccagcttccccccagccccggctccgggagatgtgccgggcggggggcccgggttcgccgagccgcaggagagacacgctgggccgaccccagagcggcgctggacaggtgagtgtctgcgggcccagggcgaggggcgaagccgcacctgggccaggtgtgcggggcgcgcggaagaggggaggcgggaaggatgggaggccggggcctgtcctggccgcgagggcggaggggacgctggagccgcgcggggcaccgcacctgagcgggaggggcgtcgggggcagcccgcacctcacccccactggcgaggggcccgggaggggcggcccccacggagctcccggggcgcgggggtgcggacgggcgaccgcagggtgcctggcggggggaggggacagcgagtgtgcccgcgcgcgcgccagcctttgtggggaagcggcgccgcggtgcctgcgtgtccccggtgcgtgtgcgcgcgggtccttggcgccctgtttgtgtaggtgtctgggtgtgagcggagggggtgcgtgtgcgtgtgcgcgccgcgcgccggccccgggccccagaggatccgtgtcggggattggcaccacaggatgctgggcgagggggttgtttttctctgggaggcagtggcgcgggggatggggaggggtccgtctgggtgtcaagccggccgcagtccggggggcgccgctgtcaggaagagggggtgcagccaggcagcaccttctctccgtggtgccgggttaaagcacgggaggccggcaggtttgatccacccggattattcgtgctttgaggacagctccccacccccaccccaggtgcgcattggattgagctacgagggttcagttgtcatcctcccatctgacggtcctgggacccgagtccaggcctgaagtggtggggtgggggggtgctgtgtttgctccagccgtgtccagaaaatgccctcccaggtatctctccagtgcacccccggcccccatctgaagacagccgctggctacacacacccctgtccctacacttccagtccaggtcctcacactgccccatccctggccagcacctcactgtacctgcctggaccctttcttcctgttccaacccccatccacccccagccatggcagctgcgtgggggtttctgtatcccagttccaggcagggcccccctcttccgcctggcttccactagactcagagctggggtctgtcttcccacatcccacatcccaacatgtgtgcctgggggcaggagggggaggggttcaaaatggctgccaagatggctgtctcgctgtctcgcgctctctctctcgctgtctctctctcgctctctgtctttctctatatctctctctctctcttcccctctctgcttgcccggctcccttatcctggtagggagtcactgcttagaggaggttggacccagtggggcacacctgagggtgaatgtatattcccggccgttgacctccatgctgtttggggacagaccattggtttctgcttctctctccaacaccccaagggctgccatgtgcctaacctgaccccagaccccactccttcaccctggctcacagcctgaaagctccctgccctccacctgctctccagggcctggccccctgaattgatcaaccccgcggagggtccacacccctcattctcttctccggtctgccccacggcccgggggcaggggattgattctgcgtgggcccctgtcaggccccagctttggggggcaggtgacttctccttcctccctgctccccttccattaatgccaaatttattacttaaaagtaggatgaaaacagggagaataagagaaggtttacaatcttcattatcatatcgagaaaattatccgtgattttcctaactagcaatttgcctgccatgccgttcagaactgacttgcccattaattacagagatgaaaaatcatctggaattcggaaaagggaactaattccatggctggcagcgatcgcacccgtgcacggagccacatacatgtgcgacatacgtgtgcgctcacatgtaggtcccggccctcttgctggtcttgccaccatcttcctacccagcttggtgacctccctcatggccttgctcggtccaccccatgtgtgtgtggcacctgccctgggacacccctgcaggccctctttctctccaaggggcgcccatctcaatccccacttctgggaagcttgcgtaccccgtgatcacccacgctgattcctgctcttgggggtgtagctggcgcccagggttggggaggatggagagctggggaccagcacacctgggctgtggagcctgcagggagggggtggaagggggggacttgaagcccagcttctattcccagcctgcccaggggagccctttctcctggggggcctagtaggaccctgtgggcacgttggggaggagcctacaggcgcctcagctgcacgggagtgtgtttgcatccagcagtttgggcccccggccggtggcgtctccacctgcacgtgaggctgtgtgatgcttgcaggcatctcggtggggagggtggcagcgggtgcccctcaagaggaacaggaggagtgggagcactgccatccccgctggagcatcgtctttgccctccaccccctccttcctccctggcgagacatgtggccagggacacacaaggctctgggttctgtgtgggttcctctcacggatctgatttccacatgccagacacttccccttcttccagcccctccgtggggaggcagggagaggggctcccgaggcgggggttccctgggtctgaaaccctgaccccagtgaccctgaaggtgccatggcaagacagacagctcctcccaggctgggtttggggcaaagtggttgctattgggcaccctgatggaaggggagagacgggtcctggagtgaggtgggaggccaagtagaaacatggagggggtcccggtgtccccagaatccagatgtctgtctgtctctccacctgtgcataggtgtcctctgcctgtgtggcctggatggtgatctagccaagggtgcatgtggccacgtgaccatcaggcacatccggtgttcataagggtcccttgtgtgctggtgtttgtgttttgcagagggggtggtcatgctgggggaggtagggctgcaagaaggagtagttgtctgtgtgcacacatggagctgtttgcatcttttgtgcacctgcagttgtgtgctcaggatttcttggagcaaggctgggtgcaccttgtcatgcaatctgcacacacttgccaagtgccttccccacccagcaccatgcggggggtgccatgggggctggtggccacgtcctgtcctcatggagctcacactctagcaacacatatggggtttccatcaaagctctcctatcagctgggcgtggtggctcatacctgtaatcccagcactttgggaggctgaggtgggtggatcacctgaggtcaggagcttgagaccagcctggccaacatggtgaaaccccatctctactacaagtacagaaattaggcaggcatggtggtgtgcacctgtagtcccagctaccagggaggctgaggcaggaggattgcttgaattcaggaggcggaggttgcagcgagccgagattgtgccactgcactccagcgtgggcgacagagcaagactcattctcaaaaaaaaaaacccaaaacaaaaaagcaaaactctcctgtcatgcgagttggggagaaggcatgtgtctccttttcgagggtagccccaaattctgactgcagtagcccacaggcttggactgtcctggggtctggcccttcatggtctttctgggccacctcctccctcctcgttgctcctccagtgtgctaagtgtgatcctaccccggggcgtttgcactgctgttctgccatctaggacccttccccagatatttgcgaggctttttctcccccaccctcttgaaatatcacctccccagtaaggtttactcccaggcaccttctgcagagtctcagcttcccacacccctcctgatgttcagtacagcagacggcttttcacataggctgtaatttcctgatgttctgcgcttgtttgtttactgtctgtgtctgtgaggaggatccaagtgcgcgaggatgttgtgatttgctttgctttgggaatcccaggtgtcagcagtcatcactggcccacagtgtgcgttcaagaagtcttacctgacccaggtgtggtgactcacacctgtaaacccagaatgttgggaagccgaggtgggaagattgctcgaggacaagaatttgagatcagcctgggcaacatagcaagactcgtttctaaaaaatttttttaatagttgggcatcgtgaatatgcacctgtagtctcagctgctcaggaggctgaggtggaaggatcgcttgagcccagaagtttgaggctgcagtgagctatgattgcacgagtgcactccagcctgggcgacaaagcaggatcctgactcttaaaaaaaaaaaaaaaaaaaaaaggcccctgccttcactgtctcctgttccaaaatttggggggagataaaaattcaataaatagatgcccaggccaaaaatagccttgcccccccgccaaaaaaaaaaaaaaaagcctcagaatagtcagtgcccctccctcagaggctaaaaataccctgcaggtcacaaatgatcaggtcaggaagccaggtggattctccttcctgtccttgaggaggtgaggggtccggggctggctttctcagacaggatttcccagatgatttccattactcctgactttggcactgcatcattctctgtgggaggctgtcctttgtactataggatgctcagaggccaccctagcctcttcccgatggatgtcagtgacacctccagccccacagttgtaacacctcggaacgtctccagacattgctaaacatactgggatcaggggcagaattgtcctgggttggcagtgatggctgtagagtagaggttgccagtggggcaaggtggcccacgcctgtaatcctagcactttgggaggctgaggcaggaggatcacttgagtccaggagttcaagaccagcctgggcgacaaagcgagacccccttctttacagaataaaaaattaaaaaattcgttgggcatggtgctgcacgcctgtcgtcccagctactcgggaggctgaggcaggaggatcacttgagctgggaggtcaaggctgcagtgagctgtgatcccgccagtgcattccagcctgggcaacagagcaagaccctgtctcaaaaaaatatatacataaataaaatagagtagaggttggctgactttcctgtagaaagcccgatggtaaatcctgcaagctttgcgggccgcagacgggttctgtggcctgttctcttttctcttctcttcagtcctttaaaaatgtaaacaccattcttagctcaccagctgtacaaaagcaggctggggcctggccatggttggccgaccctgccccagaacgccccctagtggcttctgggagtgaaggctgggcagaggggcggccccatttggggagcagttgtgtgcttaaagtacaaggcgagtcccgcgcagtctgttcccggcacctccctgctctcacctcctcccactctcctcaccagctcacgacccgcttcctcgatgcagctgccaccgttattcaaacatacaggcacagtccagccccagggcctttgcacgggctgtgaccctgcctaggacgctcttctaactctcctgaactgatcacctgcgtgctcctccctcaaattcacagaggtttgctaaaatgtcatcttctccaggggagatgacctttcttgatcatcctgttgaaaattgcaacagccgggcacagtggctcatgcctgtaatcccagcactttggaaggccgaggtgggtggatcacctgagatcaggagttcgagaccagcctgaccaacatggtgaaaccctgtctctactaaaaatacaaaaattagctgggcgtggtggtgggtgcctgtagtcccagctaatcaggaggctgagtcaggagaatcgcttgaacctgggaggcagaggttgcagtgagccaagatcatgccattgcactccagcctggatgacagagcaagactctgtctcaaataaataaataaataaaagaaaataaaattgcaacagccgggcatagtagctcatgcctgtaatcccagcactttgggaggatgaggtgggaggattgcttgagttcgagaccagcctgggaaacataacgaggcccccatttctacaaaaaaattaaaaattagctgggcacgatggcacacgccctgtggtcccagctacttgggaggccgaggcaggaggatcccttgagctcagaggctgtggtgagccatgatcccaccactgcactccaccctgggcaacagagcgagaccctgtctttaaaaatacgattaaaaaaaaaaaaacactcccaaacccacacacactcatagccacttttcctggctttatcttctttcacaacactggtacgctacagagtcgacttttttgtacccagcccctcagtgtctggcacatagaagatgctccaaaaaagatgtgtggaattgccaaaaattatttctaacccccacagccaccctgggatgctatcgttccccagctcccccgtggagagacagaattgagaggagtgatgtgggtgtcctgtcgtgccgacatgacggcgcacagcctggatttgaacctgcaacttaagggcgctatgcccggggcctcttctctcctgccctgctaggcaccatgcccccgtctcctggtctcaccctgccccttaactgccggcatctgatgaggcagggggatcccgcctctgtgccctctgctcgggccctagcttctagaactcttcagctctgctctgctgagctcggagtgcaaagcttggggctggacagtgaacactttggagtggaaacagaccacaggccacaggccacaggacctgccatgatggtgagcacagcagaggtgcaagtcagggaaggcttcccggaggcgggggcttcccagctgcaacctggagtgggaggaggggtatggcggaggggaaagagcatctgtgagagagaggggctgccctgaggtcagacagaaggtggtggctcaaaggggaggaaggagagatgtttcacaactgcacatggagagaagctggaggctgctggctggccttgtgactgtgagtctgtttggtttgtccgtggggctgccagggcctgtggcagggatgggggtagaggtagggggtttatgtcaggatccagatgtcagggtgagaatgtttagcatgagctccctctagctgctacatgggagagagccatagttggcaggaagggaggccaggaggccagaagggaggccaggaggcaaccagcaaggtgagggccagaagcagccagcacttggtggaagcttcaggtttctggctttgacagccctgtggacaaaaggcaagggacaggtggggtagggagtaccctccactcccagcaaccctccccacacacagtctgatctccatctctgtggccagaggacacctgtgaacacccgagccagatcccatccctcctttgttcaggattcccaatggctcccacctctctagaaagccaaagtcctccttgaggtccacaaggccctgcatggcctctgtgacccccctccccagctgccctcacctccttccactcttcccttgcttgcaaggccccagccacatctcagcacattcctaccccaggacctttgcacgtgctgttccctctgcccagaatgctctttccacaggtacctagatggctcacctcctcaagacctctgccaaaatgtcactttttaggggaggtatttcctggccaccctgtctacagttgcacctacacgtataccccctctcaggcacaccttcctccattgcacttgtgaccagttgggaactcggtaaacatccactgaatagatgatctgctttttgggtctatttcatcttcattcattaaacaaatgaacaagcatccactccttgcccagggctgggtatgcaacaagagccagcccaacccgcaatggtactttgccctcagagtccctcgatggtggagaagacagacattaaacagctgagtccaagtccagttaggggagcaaaacacagaggccctgtgttctgtgagagtggatatgagagatacgaatgccgtcctctgggcagagccctttggagggagagcagaataaggaactgtgtgtgagagagagacagacgctgagtagaagtgatgggaaggtggcaggacagcagggcctgagatgccatgttagagcatcacaggcaatagggagccatggagggttgtaggcagggaggggtgtaattggatttccattttgcaaagatcattctggcctcagggtagagactggatgggacaggggtagcagatagatggggagacgaaggagaaggtgtcgggggggtgcagggaattttttgaacgacccctaccgctctgcagtctagtgctgcttggtggctggggtgacctttattttatttagagacggagtcttgttttgtcacccaggctggagtgcagtggcatgatcatagctcactgcagccttgactttttgggcttgaatgaccctgctgcctcagcctcccaagtagccaggaccacaggtgtgtgccaccatgcctggctaatttttaaatttttgtagagagaggatctcactgtgttgcccaggctggtctcaaactcctggccacaagcaattctgcattggtctcccaaagtgctaggattacaggtatgagccactgtacccagctccagggtgacctttaaaaggttcttcattgaacaattatatttcagcttcctgcttgtgccaggcactgtgctgagtgtagtatgcaaaccccaccctgcagagccagcatctagtagcagagagttcataagcaaataaaacgcatggcgtgctggtgataggtatggagaaatcaagtcaggacacggcgtaggagtgcgggggccagcaggaccttgccgagctagtgatgtttgaggaacgaccaaaaggaagatgcaggaggagctgtgaggggatctggagaagagagaaacagcccgtgaagaggccctaaggcagaacagtgcctggtgtttcacattgtacagggcctgtttgttttttgtttttgagatggggtcttgctctgttgcccaagctagagtgcagtggcataatctcagctcgctgcaacctccaccacccgggctcaagagatcctcccacctaagcctcccgaggagctgggaccacaggcgtgtgccaccatgcctggctaactttttgtatttttggtagagacagggtttcactatgttgcccaggctggtctggaacttctgagcccaagcaatcagcccgcttcagcctcccgaagtgctgggattacaggtgtgcgccgccacatccggcccagtgcagagcctttgtatgatacagactttggcttttggtcgagtgaggtgggagccacggagggttctgagcagaggagggaagcagctgacttagatgctcacaagcgccctctggtggccatgggggaaacatactgtagacagtttcattttgcaaagattgttctcacctcggggtagagattggatgggacaggggtggcagatagatggggagacgaggtgtagacagtgaggtggggaagtggggtccagccaggagatgatggggctggaccagagaagctgaggagtggcgagaggtgagtgggctctgaaggagtagccacaggacctgacggggctggatgtgatgtgaggggagagggatccaggatgactgtccggttcctgagcacctggagggactgggctgccatccgctgagctggaggatggggcagggactggagatgccgcgacaaccctgccctgcccaaggaccatgtacctgggccctctctgggcacgtgctctgtctctgcgaggtaggtctgttagtccctgagcagcaatggggaaataggttcagagaggccaagtgcttgctctgaagctacacagcagattgaaattcaggagcttcgactctcagctggtccttcatagtcaccccggggcctgcagcttccttatggacctgccggatgcctgagggcttcctggaggaggtgggctcatgggcggctgggtttggggagtgggcaggaggcaggagatgcagccagagggctgtgtgtggaggggccggctgctgccaagaagggagaagaccatgaagggggctcagatcccagatccccaccttggttccccgccaccccacccaaggcactcagactcccaccccctcaagcgcgcagagggttgccatggcaactgcaggctagggcaggctagaggcgccccctctcccccagcagccacttctcctcctgtcgctctccccatctccatcccagggcacccgaggacagagtctaggccttagtggcccaccctgccgcaccgacccttgacttgagacagacgtagggcttagatgcgaacatacaggcaggtgtgcagccccgtttcccatgggtgaaatagggtcacctatggctgggtgcaatggattcctgggtacacctgtaatcccagcattttgagaggctgaggcgggaggattgcttgagcccaggaattcaagaccagcctgggcaacatggtgaaacctcatctctacaaaaaacacaaaaattagccaggcgggggtttgtgtgcctgtagtcccagctactcaggaggctgagctgggaggatcacttgagcctgggaggatgaggctgcagtgagctgagagtgcaccattgcactccagcctgggcaacagagcaagatcctactgtctcaaaggaaaaaaaaaaaaaaagagaaagagaagaaagaaggaaagaaaaaagaaagacaaataaggtgactggagactactgaggtgcaagcgggggacagacacaggtgtgggctcacctggcttcccagatgtagaacgtccaggcgtgaccagctctgaggttgcatagacactcaaatacagtgtgggcccgggggtgggggctcttctggccccccaggatacccccacagctcatcaagcccaacctggggagccagccctccctgggttcaagcccccttaccagttgggtgtccctgggtatatctcttcaatgacaggacctcactttcctcctctgtaagctgtgggtacaagcatctctccttcctaaatggttattaggattacatgagctacacatggaagctgttcgggctgggacttggaggtgtccgccactgtcccaggcatctcaggtgattccttgctggagagcccagctagatgccctccctgtcgtttgctgtttcctgtaaatggtttctttaaagttctgcggctcaggcccttgcccccatctctgcctccctcctcactctctgtgtgtcctgactccctatatgaatttcctaggctcccacaacaaattaccacagacgggacagctttagcaacagagactttattggtttttttgtttatgtttcagagatggggtcttgctctattgcccaggctgaagtgtagtggtgcgatcacaggtcactgcagcctcaacctcccgggctcaagtgatcctcccacttcagcctcctgagcagctgggactacaggtgcatcccgtcatgcccagctacttttttatatttgtttatagagctggggtctcactgtgttgcccaggctcgtctcaaactcttgggctcaagcaattctcccgccttggcctcccaaagtgctgggattacaggcgtgagccactgcagccaacaacagaattgtgtcgcctcccagctctggaggttggaagtccaagatcaaggtgtcgtcagggttggttccttctgggagccttcagggagaatccattgcaggcctgtctcctggcttcttttggtcattaactggcaatcttccctggcttctagaagcatcactctgatctctgccttcatggtcacatggtcttctgtgcatgtctgtgtccaggtttctcctttgtataagggcatcagttgttggattaggacccacactaatgacctcattttaacttgattatctctgtaaggactccagatgttcccaacacagtcacatttgagttatcaggagttgggacttcaacatatcttttgtatttttgacatggggtcccactctcttgcccaggctagagtgcggtggtgcaatcagagctcactgcagcctcaacctcctgggttcaagcaaccctcccacctcagccttcccagtagctggcacgtgccaccgtgctcggttaatttttgtgttttttgtagagatggggtctcactatgttgctcatgctggtctcaaactccaaggctcaagtggtcctcccaccttggcctcccaaagtactggggttgtaggtgtgagccactgtgcactgtgcccagcctgacattttttttttctttggcggtgggggtcgggggctgtaattcaatccgtaacacctccccctccagaggcctcagggatggtcaggcctgggtctcccaggggacacccaccacctgccaagctgaggctgggccctgggggtgtctggagcttcctaggggagccacgctggggagagggcgtcgtgctcctggggaactctgtctgtacccctaaggcaatggcaccctgcctgtgggggtcaggcgtggcccgccaggtcacagggcagatgccccatctccagctatcctcactgccatccttagtcactcccctgtgactaagtaagtttttgcttggggacccactgtgtgttcaggggaccaggagacaggagtcagggaaaccaagttccagcctcaggagtttccattctcctgggagtagaaagaaaatctagaaggctgggtgcggtggctcatgcctgtaatctcagcactttgggaggctgaggcgggtggatcacctgaggttgggagttcgagagcagcctgaccaatatggcaaaaccctttctctactaaaaatacaaaaattagccaggtgtggtggcctgtgactgtaatctcagctactcaggaggctgaggcaggagaatcactcgaggttcttgaatcacttgaggcagaggttgcggtgagccaagatcacgccaatgcattccagcctgggcgacagagcaagactccgtctcaaaacaaaacaaagaaaaggccgggagcagtggctcacgcctgtaatcccaacactttgggagatcaaggcaggcagatcacctgagtttgggagttcaagaccagcctgaccaacattgttagtagagcaaaacgtcgtctctactaaaaatacaaaaattaggcaggcttggtggcgtgtgactgtaatcctagctactcaggaggctgaggcaggagaattgcttgaacctggaaggtggagggtgcagtgagccgagatcgtaccactgcactccagcctgagcgacagagtgagtctccatctcaaaacataaataaataaaataaaataaaggaactctaggagtggtcaagtaaaagtatagagcagggatgggatggatgaggttatggactaaattgtatcttcccacctccctcccaaatgcagaggttgaagccctgactcccagcgtgagtgtttttggaggtaggcccttgagggaggtaattaaggttaaatgagatcttaagggtggggccccctactctgagaggactggtatcccaataagaagagagaggccggggcttgtggctcatgcctgtaatcccagcactttgggaggccaaggcaggaggatcgcttgaggccaggagctcaagaccagcctgggcaacatagtgagaccccatctctacaaaaaaaatcaaaaaagtagctgggcacaggagcacgcacctgtagccccagctactcaggaggctgaggcgggaggatcgcatgagcctgggaggttgagactgcaatgagccgggattgtgccactgcactccagcctgagcaagagagacagaccttgtctcagagaaaaaaaaaaaaaaaaaaaagagacagcagggatctgtctccctttatgcatgtctagagaagaggccctgtgaggttatagtgagaaggcggaagagaatttccacagaaactgaattcgctggcaccttgatcttggccttctggcctccagaactaggaggaagtaaatttctgctgtgtaagccgcgcagtctgtggtactttgttatggcagcccgagctaatggagaaggtgacaatggggacaagggatgcttcaccctgtctatgtgccaggagcatcccgagtgtctcatgtgtgtgaatttgtcctgttgcacagctgccctctgaggtatccccgttttaccaagaagaaaacagagacacaagaggtcacagcatggcaagggatgcacaggcaggtggtgactgcagggcactgtgatacagggtggcggaggcccatgtctgcgtctctggggaggacacctctgagtctgagggacacagatggggacaggctgaggctgcagggtgggaacccgcatggctggagggagacaaggcgggagtcagaggtgttggaggggttaaagcagaagacccaccactcaacattgtcttttgtttttgtttttgttttgagacggagtcttgctctgtcggccaggctagagtcggtggcgtgatcttggctcaccgcaacctctgcctcccaggttcaagcaattctcctacctcagccttccgagtagctgagattacaggtccccaccatcacacctggctaatttttgtatctttaatagagatggggtttcaccatattggccaggctggtcttgaactctttttttttttttctttttttttttttgagacggagtctcgccctgttgcccaggctggagtgcagtggcgtgatctcggctcactgcaagctccgcctcctgggttcacgccattctcctgcctcagcctcccgagtagctgggactacaggcgcccgccaccacgcccggctaattttttgtatttttagtagaggcggggtttcactgtgttagccaggatggtctcgatctcctgacctcatgatccgcccgcctctgcctcccaaagtgctgggattacaggcgtgagccaccgcgcccggccggctggtcttgaactcttgacctcaggtgatctgccctcctcggcctcccaaagtgctgggattacaggtgtgagctactggcccggccaagattgtcttttaaaacacccctctggaatggatgaacctggaggacattatgctaagtgaaataagccagacacagaaagacagatagtgcgtgacctcacttatctgtggaatctaaaaaagaattgaactcgtagaagcagagtagagcagtggttatgggggtgagggcacaggggaaggcgggagatgcaggtcaaagggtacaagctttcagctttcagataaacgttttaaccaggcagaatggcttgggcctgtaatcccagcactttgggaggccaaggcgggagcattgcttgatgccaggagtgcaaggccagcctgaacaacatagcaagaccctgtctccacaaaaacatttaaaatcagccaagcatggtggcacacgcctgtaatcccagctacacggaaggctcaagagggtgaactcttgagcccaggagttcgagactgcagtgagctatgatggtgccactgcactccagcctgggcaacagagcaagacctcatctctaaaaaaaaaaaacttccagagacctaaggtacagcatggtgactataattaataatagcaggccaggtgtggtggctcatacctataatcgcagcactttgggaggccgaggcaggcagattgcttgagctcaaaagtttgagaccagtctgggcaacatgagaccccatctctactaaaaatacaaaaattaaccaggcacggtggtgcccacctgtagccccggccacttgggaggctgaggcacgagaattgcttgaactgggagggagaagttgcagtgagccaagattgtgccactgcactccagcctgggtgacagagcgagactccgtctcaaaataataatattattattatagcatactgttttcttgaaacttgctgaggaattagactcaagtgttctcaccacacacaccagaaaggtatctaggtgaggtgttggatatgttgttagttagcttggttgtagtaatcatttcacaacacataatggatatcaaaatatcatgtaaccttaaatatatgtaatttctatttgtcagtgatgcctcagtaaagctagggagaaaataaaaaggacccttctgtgcaacagcccacatgtccattaccgatgactggataaagaaaacatggtccacccatgcagtggaatactacgcagccataaaacggaatgaagcccggatccaggctataacgtaggtgagccttggaaacgtggcgctgagtgagaagctggacacaaaataaggccaggaatggtggctcacacctgtaatcccagcactttacgaggccaagatgggcagatcacttgagtccaggagtttgaggccagcctaggcaacatgacgaaatcctgcctctacaaaaaatacaaaaattagccaggagttaatttagaggggtcatgtgactatagtcccagctactcaggaggctgagacgggaggatcacttgagcctgggaggtggaggttacagtgagccgagattgggccacggcactccagcctgggcaacagagtgagacccccatctaactggtggggcgggggaggccacatagcctgtgattccatttgtatgaaatgtctagaataggtaaatccatggagacagaaagtagactataagttaccagggctgggcgacgaggggagtgggcgttattgttcagtgggtatggagtttctatttggggtgataaaaaagttttggaggctggacacagtggctcatgcctgtaatcccaacacgttgggaggccgaggcgggtggatcacttgaggtcaggagttccagacgagcctggccaacatggtgaaaccccgtgtctactcatggtggtgggcgcctataatcccagctactcaggaggctgaggcaggagaatcgcttgaaccccagaggtggaagttgcagtgagccaagattgtgccactgcactccagccccggtgacaaagtgagactccgtctcaaaaaaaaaaaaaaaaaggaggtggtgcctctggctgccaggagagcctggacatcggaggcaaaggggccagagggcacttggggagtggccagggcccaggactagaggggcagatgctgaagacagatgtgtggaccaacactggggtgttctggaagtatacacagcccaaagacttactcttgaactggatttaggggtgagagaaagaggagtcaaggctttcagctcctggggttctggctggagggcctggaaggatggtggcaccgtgcactgatgtaggggcttgtattggtctggttgggctgaagatgccttggagttcctggtggaagtatacatggctcagcgggggctccactctggagtctcagcattctagggtgcagcctgggaggaagagagggactgcctcttccgtgggtgtctttgtgccctgactggcgccaggctgtgcatggcaccctctgatggggcctgtgttggcccagcgtgtacgtgcactgctctccttaccagaaccctgcagaatagcagcgcagagggaaccagggccagggaggtgaggagaccagctcaaggtcacacagggcacgtataaggcaaaattgggatctagacccatgtggattcgctgcccacacaacttggcatcgggtggcttccctgccctttttttttttttttaattaagagagggtcttgctctgttgcccagactggagtgcagtggcaggatcatagcttactgcagccttgcaaactcctgggctcaagtgatcctcttgcctcagcctcccaagtagctgggcaccaccacgccaaattaaaaaacaaaaaatttggccgggcgctgtggctcacgcctgtaatcccagcactttgagaggcccaggtgggctgatcacgaggtcaagagatcgagaccatcctggccaacacggtgaaaccccgtctctactaaaaatacaaaaaatagctgggcgtggtggcgcatgcctgtagtcccagctactcaggaggctgaggcaggaggatcgcttgaacccaggaggcggaggttgcagtcagccgagatcgtgccactgcactctagcctggtgacagagtgagactccgtctcaaaaaaaaaaacaaatttctagagacatgttgcccaggctggagtgcagtggcacgatcatagctcactgcagccttgaactcctgggctgaagtgatccacccaccttagcctcccaaagcactgggatcacaggcatgagtcaccgtacaaatccagccatttttacttcccctaaccagttcctctgctaggatgcctgttgcagtgtgaaagaaagcgcttggagaccctgggaggggagtactcctcagcttggggacactgcctccactgaacctttctgtggctggacagttggagaaatgaggaagttgaaataaggaagccactccccatccccaaagtaacatgctggaaaatgatctgaaagtgacaccagccatgtctagtcacagatgtggggggagatgcggacgggggctggtggcggctgggggagtaacacgctgtaaaatgatctgaaagtgacaccagccgtgtctagtcagggatgtggggggagatgcggatgggggctggaggtggctgcgggggatttagtgaagaagctggggcagtggagagggagctggtatcaggagtgggcatgagaggggaagcgggcagagagctacagggctggagagggggtgttcagggctgtcttgcagatattatcctcccatttcccatgtgaggagactgaggtctggaccaggtgtcctgccctgtggggatctttatttattgagggcctgtgcctatttgttttattttatttatttatttttgagacagtctggctctgttgcccggactggagtgcaatggcacaatctagcctcactgcaacctctacctctcgggttcaaccaattcttgtgcctcagcctcccgagtagctgggattacaggtatctgccaccacgcccggctaattttttggtatttttagtagagacggggtttcaccatgttggccagggtggtctcgaactcctgacctctggtgatccacccgcctcggcttcccaaagtgctgggattacaggcatgagccactgtgcccagccgtgtgctgatttctaagggcctctctcaagaagctcgtgttgataaaaaggtaatttcaggtgctcacttgagagctgtgaattaaaaacagggaaaagatggcgggtgagggcagcaggcgaggactgttttgtttgcagggggccagggtaggtcactctgctgcggtgaccttgcggctgagccctgaacaatgagcagccgcagccaacatgcagggatcctgcttgggggctggaactggaatgttgaatgtttcaggaacaggagggaggacagaatggggcttggagagcttggtggcaccagttcacccacagcctctgggctctagtgaggaaatgagaccccagcagagaccagggggtcagttaatgttcggatcaacatcattatgtggtcccttagctctgagtgaagggcggattgggaggcgggcaaggaggccaggacaacatacaggtgacataggatggcggcatgggcctgggtgctgtgcttagagccagaagtgggcaggtcgcgagatacttgagaggcagagcccacaggacttgctgatggcttctgtgagggggatgacagggaaggtgaggaatcaaggcagagtctcagctttgggatctgagattcattcaacaaataattcagtgccgcgtgccaggcctattctaaaagttgaggatatgaagacaacaatggtgatggcctcaagcagtaatcccagcactttgggatgttgaggcaggaggatctcttgaggccagaagttcatgttcagcctgggcaacatagcaagacctcatctttgcaaaataaaataaattagctggacgtgatggcgcatacctgtggtctcagctactagggaggccgaggcgggaggatcgcttgagcctgggaggtggaggctgcagtgagccatgatttcaccactgcactccagcctgagtgacagagcaagaccctatctctaaaaaaaaaaagtaaaatttggggatgcggccaccatgagcaaaacagttcaatgatccctgccccatgaagaggacattctatacaccaggtgaatagttccatctgagcaatggcctgaaggagccggccatgtggacagtgggttggcagaagctacaggtggaggaagcgacaggtgcaaaggccctggggcaaggcctgctgtggtccaggaatagcaggagtggctggagcagacatggggtcagggagctaactgggccaattacaagggttttggttttcagcagggaaatggtaatgggggctctgatgagaaattccaggctggacataagagatttgaaagtgctggctcaatgatggtactgagagcccaggacagcctgagatgggacaggctgggatgacagctggatgtgacagagcaggggttcccatgctggagggcccgcctcagagaatgtgtgtttctggccagcacagtggctcacgcctgtaatcccagcactttgggaagccgaggcaggcggatcacgaggtcaggagatcgagaccagcctggccaacatggtgaaaccctgtctctaataaaaacacaaaaaaattagccaggcgtggtggcgagcgcctgtaatcccagctactctggaggctgaggcaggagaatcgcttgaacccgggaggcgcaggttgtagggagacgaaatcgcgccactggcactccagcctgggcgacagagggaggctccgtctcaaaaaaaaaaaaaaaaaaaaaaaaaagcaaggctcgcaaaacaccggattccttctcagctttctgagctgaaaaggtatagatcctcaagaagagaagagtgtatgtaagtacttctcaaccagtttacctctctgaccgctcttacggtgtttgggggcaaaaaactaaggatctagactctctaaaccgctcgctgggtccttctctccccacaatgcaccggggccagcaggaaggccgctccgacccctaattttcccgcgaattcagttcaaagaggcggccgggcccgcgatcggcagcgcgcaccggccaaccaagccgcgcctccgcgagaagcgcctccgcgtgactgacgggggaatccgcgggccaacgggctgggcggcccggcggtgcgcgctcccgccggccaatcagagcgccgggcgggggaagtgggcggagcgaggcctgggtagggtgagcggcctccgaagcggagcggggctctgaggagacactttttcttcctccctccttccctcctctcctcctgccttcccttcccctttcctcccctctctcctccttctcccctcggtcagccggagcctgctggggcgagcggttggtattgcaggcgcttactctccggggccgcccggcgagtagctggccggggaaggaggcaggaaccgcgatggcgcctcagaagcacggcggtgggggagggggcggctcggggcccagcgcggggtccgggggaggcggcttcgggggttcggcggcgacggcttcgagcggcaaatccggcggcgggggctgtggaggcggtggcagttactcggcctcctcctcctccgcggcgttaccggtgaagaagtcgaaaatggagcacgtccaggctgaccacgagcttttcctccaggcctttgagagtgagtgcgtgcgaggctttgagggcaggaagacccactctgccaacaccggggatgggacactctgctgggcccccttcctcctcgggagtccacttgtgtggtagtggagggaggaattgaggggatgtccccctttcggagattacgtctccaggggatccggagtccagggccttgggagagctggaaaagagggtccgggcgggttcttgactcccccaagattgacgcaagaggctcgggactggggccccacgttcagagcaggcggcttttagatgaggaggtagcagttgaactgagccgcagtcacatcccgagactggttcttgttttctttcatgcctttcggactctagaaatacaggggtttcggttgtagcttttgaggggcaaaatgaagcctgtgaagggatgagtgcagtggaaccgaagaaagtgtccttagtctgaaatgccttcgcgctaacttggtgctgcaggttcctatggcacctttggatgcttaaaacccttcaaatctatccacccattttgtggatatgtaaactgagccagagagtggtcaagcatcttctctggagacgaccccagaattctgctttttctactcggcttacaggacattttcttgggtcaatttctgtttctaaggtctgtctggtaggtgaaactgacttatttggaaaggagagcaaggtgtctggaaataaacaatagaatttattaaaaacatcgtgactatgaataatcctgattgttctttaaggaatgttatatcctgattggtttccttttttgcttttgtgtgttataatttgggtgatctttaatagctaagtaatcttacagaaacttgaataaacttggctctaccgcccagtgtccttatttacagtttcactgtggcatatattaagggcatggtatcagctgtgcttagaaagaccgtattatgttgtttaatacccttccttcattctctctcattagtgcttcatgaaattctaattggaacttaatagaaggagtttcagtttttatcgaaacgaatattgaccttgcttcagagagattcacattattcacatatttcttaatatactttgaaatatctagagaggctttaattggaaataggatggagaactgaagggcagtggtgacaataatgatacttgtttgtaccccttctaaagtatctcatctccctttagttaatttaagataaaactaaccaattgaagatttaggtggaaattttaaaagttctttctgaatgttaagagaagacacattctccaagaaagttttaactatttgcgttctgatgagtcgacctcagggaagtcaagtgtcattaagagctagatctggtcataaaacaacttgaagttgtttactggaaagtttaaatacttgaatgtaattattcacagttatttctatttggtttattctgatactgctgtataatgacaacgtgatactaataggtcattaatgtaactaatataatagtatatgtatttttcatccacttaagtcctgtataacaaattacattttaactaatttgaaatttaattcaactcattttaagcgttagacggttttgtgaatctgtcaattgtgtaaaaaatgtattgaggtaatatttatattgaacaaaatagataaaactttaaattataattaggaatatttattgagaattttttctgcagtttgtgtccgagatttatttcaacattgactgacttttgagtgcagtggatcccacctgtaatcctagctactctggaggctgaggcaggaggatctgttgagcccacgagtttgagaccagcctgggcaacatatcaagaccccttttcaaaaaaagaaaaaaaaaatcttgactgactttcatcatacctgtattaggaatgtctggatctgtattaggatgtcatcatatctgtattaggatgtattaggattctgttttggctgactacaattttttttttttttttgagacggagttttgctctttgttgcccaggctgcagtgcaatgacgcgatctcggctcacggcaacctccgcctcccaggttcaagtgattctcctgcctcagcctcccaggtagctgggattacaggcatgcgccactatgcctggctatttttgtatttttagtggaggcagggtatctccatgttggtcaggccggtctcgaactcccgacctcaggtgatctgcccacctcagcctcccaaagtgctgggaatacaggcgtgagccaccgcgcctggccggctgactacaaattttttaagtgaccatttaaaaagtgaaattttcatcttgtttggcatcaatcaatagttcttttgttgactccagctacctattacagctgctttttggaagaaaatcggttataaatagtttaaattaagctaagttaaatgagtacaactgcttctcttgagttctgctcggtaacaataactatcttagaaaggcttaagaaaaatattgtaaagaaccttcagtataaaaagcgtagatgaactttgtgaatgtatgccattgattgaataccttttgatcttactgtgcatactaactttcttgatgtaaatatttagtgcgatataaatatttagtgcgtgatttccatagcagatgacaagtttatattgattataacatggtctcggttgatatttttctgacaagtaagtttagatcatgtttggattttgtttcctattacctagagccaacacagatctatagatttctttgaactcggaatctcatagcagtaagtagtcaacaaaattcatcaatattatttctctcttataactgcatctgtattcaattttaacatttttaaaactctttttgtagccaatatttttgcacagaactcttacttacatgtctcatcgaaactccagaacaaacatcaaaaggtacattttatgaatcttatttcaagctgatcaaaccatgttagttttattttaaagtactatttctcaaaattaaaaaaaagaacaaaaataagtactatttctaactaaagatttaatatgaaaactgaagtgagagagtgactggttgaattggttgcacagtggttttcaatagtataatctttgtaagtctcaggttgttattagctttttttttttttcccctaatagaaatgaggctgggtgtggtggctcatgcctataatcccagcactttgggaggccaagttgggcggatcacttgaaggcaggagtttgagaccagtttggccaacatggcaaaaccctatctctcctaaaacaaaaattagccgggcgtggtggtgtgtgcctgtaatcccagttacttgcgaggctgaggcaggagaattgcttgagcccgggaggtggaggttgcagtgagccgagattgcgccgttgcacttcagcctgggcaacagagcgagactctacctcaaagaaaaaaaaaaaaaagaactgattttagtagttaagtgaataaagtgattttactgattatatttttactctgtgccatgggttatttctctttttgtttgtttggttttttttttgttttgtttttattgatcattcttgggtgtttctcgcagagggggatttggcagggtcacaggacaatagtggagggaaggtcagcggataaacaagtgaacaaaggtctctggttttcctaggcagaggaccctgtggccctccgcagtgtctgtgtcactgggtacttgagattaaggagtggtgatgactcttatcgagcatgctgccctcaagcatctgttcaacaaagcacatcttgcaccgcccttaatccatttaaccctgagtggacacagcacatgtttcagagagcacagggttgggggtaaggtcacagatctacaggatcccaaggcagaagaatttttcttagtacagaacaaaatgaaaagtctcccatgtctacttctttctacacagacacggcaaccatccgatttctcaatcttttccccacctttcccccctttccattccacaaaaccgccattgtcatcatggcccgttctcaatgagctgttgggtacacctcccagatggggtggtggccgggaagaggggctcctcacttcccagtaggggcggccgggcagaggcgcccctcacctcccggacggaggcgcccctcacctctgcactctgggcactttgggaggccaaggcaggcggctgggaggtggaggttgtagcgagctgagatcacaccactgcactccagcctgggcaccattgagcactgagtgaaccagactccgtctgcaatcctggcacctcgggaggccaaggctggcggatcactcgcggttaggagctggagaccagcccagccaacacagtgaatccccgtctcctccaaaaaaatacgaaaaccagtgaggcgtggcggcgcacgcctgcaatcgcaggcactcggcaggctgaggcaggagaatcaggccagggaggttgcagtgagccgagatggcagcagtacagtccagcttcggctcggcatcagagggagaccatggaaagagagggagagggagaccatggggagaagagagggagagggagagggagagggcttgtttgtttttttgagacagagtctctgttgtccaggttggagtgcagtggcacgatctcggctcactgcaagctccgcctactgggttcatgccattctcctgcctcagcctcattttcttttttttactgttgttgttgttttgtttttgttttcttgagagaagtctcactcttgtcccccaggctggagtgtaatggtgcaatctcggctcactgtgacctctgtctcctgggtttaaacaattctcctgcctcagcttcccaagtagctgggattacaggtgcctgccaccacacctggctaagttttgtatttttagtagagacagggtttccccatgttgaccaggctggtctcgaactcctgacctcaggtgatccacccgcctcggccttctgaagtgctaggattacaggcatgagcgtgcctggcttttttttttttttgaaagggagtctcgctctgtctcccaggctggagtgcagtggcgcaacctcggctcactgctacctccgcctcccagattcaagagattctcctgcttcagcctcccgagtagcttggactataggcgcgtgccaccatgctcggctaattttttgtatttttggtagagatgggatttctctgtgttagccaggatggtctcgatctcctgacgtcaggatccgcctgcttcggcctcccaaagtgctggcattacaggagtgagccaccatgcccagcctggccttctttttctttttttgagatggagtttcgctcttgtctcccaggctggagtgcagtggtgcgatatcggctcactgcaacctccgcttcccgggttcaggcaattctcctgcctcagcctcccaagtagctggaattgtaggctcccgccaccacacccagctaattttttgtatttttagtagagatggggtttcactatgttggccaagctggtctcaaactcctgacttcatgatcttcccgccttggcctcccaaagtgctgagatgacaggcgtgagccactgcgcctggcctccactggttattttcaagtttgatagaagttgaggatttaaatatttactaaagggctcagggtaactatatttgttatgtaaaatttaagttaacttttgattattatgtgtaatttgaattagctcctgtaatgctgggttcagaaagtctcattttatatctttggttttttgttttttgtttttttggttttttttgagacagagtttcactcttgttgcccaggctggagtgcaatggcgcaatcttggctcactgcaacctccacctcctgggttcaagggattatcctgtctcagcttcccaggtagctgagattacaggtgcccaccaccacacctggctaattttttgtatttttcatgaagttggggttttaccattttggctggctggtcttgaactcctgacctcaggtgatccacccaccttggcctcctgaagtgctgggattacagacctgagccacagcacccggccttggtggtggtcttattgaaggggaaacgctttttgaaatcaataggatgaaggttttttaaaaacaatgaagtcttaaatcattagattttaaagtggggtctggaggtggaagacagcttatttctgctgtgtaacatttagtacttaaccatacataattatcaatgcaagttttttgtcctaggtgcaagattatatttatttgagagtatcaggtgaacaagtttacatttaaaggcgagaattgtgttaagcatttggtattgacattatagttttagtaaaaccatcaagttatctcgatagagtttgaaactaagctctttggtggactgctactgtttattaagtaggtatcacatttctatagcaagacatagttgagttttgtaaatctacttgtattttgaaggattgaattgtgaaaattatttgtcttttggcaatctttctgaatagagagcgtgcatgagcaagtttgcattgcaattaataggtgaaaattgctgagcacctaagtaaccaaaaaggaggtgatgaattaggttacagaattagttttgtccaccctttacctgtctactccattatttgatttttggcagcattcagcatgctttttctgtaaaggaccagtaaatagtaattattttaggctttgtggccaggatgcaaaattgaagatattatgtaggtacttaatattaaaagaaagaaaaaatttacagttttttaaaatttcagtccaaaatgtcaatctgtaaattttttgttgataaaaatacaacaatataagatacaacattttgtaatacaggcctactaatgagaaatgagaattttatttttgtgagggtaggggagataacacttagctgaattggggttcagagttagtgttttctataatcaaatcaattgctaatgtttatctgtaaaaaccattcttaccttccaggctgtacaaaaacaggcgataggccagatttgaccatggtccatactttccccacccttgatttattctataaaactagtagaattcgactaactgttttgtttcatcaaagcttttttttttttttttttttgagacagagtcttgctctgtcgtctaggctggagtgccgtggtgcaatttcggctcactgcaatcttcgcctcccaagttcaagcaattctgcctcagcctcctgagtagctgggattacaggcgtgtggcactacgcccagctaatttttgtatttttagtagagacagggtttcaccatgttggtcaggctggtctcaaactcctgacctcatgatccgcctgccttggcctcccaaagtgctgggattacagtcgtgagccaccgtccctggccatcaaagcatttttaatatagaaggtcagttgagttgctgcctaggatgcaacctgatcttaatttacaaagtaattaaattattataaaataagtttgcattcatagattaaaaagtacacatttattttattattattataattttttgagatggagtttcgctcttgttgcccaggctggagtgcaatggtgcaatcttggctcactgccacttccacctcctgggttcaagtgattctcctgcctcagcctcccgagtaactgggattagaggcatgcgccaccatgcctggctaattttgtatttttaggagagatggagtttctccatgttggtcaggctggtctcgaactcccgacctcaggtgatctgcccacctcagaatcccaaagtgctaggattacaggtgtgaaccaccacgtcctgctaaaaagtacacatttaaaatctaagttccattttcccgtcatgtttattaatttgtcccattgcaagatatgtttctgttgtctgcatgggtagagataattttaaaagcttggttaagtaaaaactgattttcttaattattgccctttaggttaaaaaaaaaaaaagtctttggggaatttttaagccatctgccagccaagaaacaaatttaagtcccacctagtttagttcctacagaaatgggtaggaataggctaggcatggtgtttcagacctgtaatttcagcattttgggagactgagttgggaggattgcttgtgtaacatttagtacttaaccatatgtaattatgaatgcaagttttttgtcctaggtgcaagattatatttatttgagcgtatcaagtgaacaagtttacatttaaaggcaaaagttacaggtcagcactggcaacatagcgagaccctatatctacaaaaaattaaaaaaattagctgggcgtcgtggctcatgactgtagtcccaaatactcaggaggctgaggcaggaggatcacctgagcccagaagttcgaagattgctatgaatgtgccagtgcactctagcctgggcagtagagggagacgatgtctcaaaaaaaaaaaaaaaaaaaagtatgggaatcatttaatcatcttgttagatgcctgatcttattacttattaggactaattattaagaaattaaagcacaactcatttgctgttgtcttcagcgtagttggtgactttggaaggtggcagatttagcccagtgattgtcgtcttttctcaaaatgttttcagaactccttttttactattacaacaacataatatccattgttggaataagcatatcattccctttaaagtcatactctcagtcgtgatattaattctggtatatttattaaagtcagctcgtgctttactctttttagaagtattcaacttccataggctaacattgccccaacaaagtaaaaatataggtcacgagaagggcatcttttactgaatccattttgctagatttcgtgtgagctgtttctgaagtctcccaagaaaattttctgaaatttcttgaatttttaaatatgctccttttcgatgaccttttgatagttatatccttctttaaatctgacctacagtaacattacctttctaaagaacagaaatccttggtgttgggggaggagcggcttttatatagttgcttatgaggtttgttttgtttttttcctaaggaaggctgggttgcttttgtgattttatctgtttcaaatggttaatattcagttccattcacttctcctgtatacagcttcataaaggtagatgagatgaaccttagaacatacaatctttttctgcagacagaatttcttaatcattacataaacgttattctgaaaagttttcagtaatttcatggccctccccaatagtaactttcagtatttatactgaatagctctttgcaactagcctaaaagagtcctttatttttgttcttttttctctcttatctgtggagattgaaaatatatagccatccttcagaaagcacttcttactatactcttggatgaaactttaatattgaagttttcagtaactctaaagttagagctttttttcccttaagagcttcgctatggaggctcttctcattcacttgaaatatagattgcatcaattctgctctaatatcagtagtttactataatatatttacattaacatttctctactgataatttttacagtagttgaatacaataaatagctcttttttggccaggcatggtggctcacacctttaatcctagcactttgggagacaggggtggatagatcacctgaggtcaggagttcaagaccagcctgaccaacatggtgaaaccctgtctctactaaaaatgcaaaaattagctgggcatggtggtgcacacctgtaatcccagctactcgggaggctgaggcaggagaattgtctgaacccgggaggtggaggttgcagtgagccgagatcacgtcattgtactccagcctgggcaacaagagtgacactcccatctcaaaaacaaaacaaaacaaacaaaaaaaacaaacaaaaaactctttttgacgaatgagattattcgtaatttttggtgtctgcattcaagcattataaagtaacaaattgatgtggaatacatttggcttttcaagtcctaaagaggaagggactatatgagtataaagagaaacattttttctaattaaattatatatgggtatagatttttagactctatctctagaacatgtcatagaccaccttaagaactaagatgaagcttgttttacaatccattcattctttaattgctttgagaagttatacttaactttcaattttttgggaaatagattttttctcttaaacttgtcgagttaaaaggtaatagttttgcgatttgatggatcattccctaacttcaaaattttttcatgatgtcaacaaccatctctttaatatgacatatcattgagctttaggctttgctgataatctttgaggataccttatgaacttcaaatatattttatagaatatttctttttttatgtgatggtgctagtacatatttgttgtgttgcttagtagacgtattaagtgtttcagaatacacataatttatatttgtttggcttaattcaacagatacttgaatacctaccaagtagaaggcactatgccagcactgcatagctttccttgaagaagagcaattactgcccttcaggagtgtataatctagtaggagaaataaaatatttacatgagttttacatgtaggaaactgaatgaaaagtaagtgtcaaaataaatataaaccaagtaccatgggtaaggagaaatcactggtttgggaataattgggtaaaaggtttaatgaaaacaagttagcgttttagatggggcttgaaggcttgtgtgctgtattatacaccgtctccatagtattcattgttatggctaatcatccatagtttatcttactaaaaataatcaaaatctgatttccatcttgcctattagagtgacaataaagtataatttgtttcttttatccagttgagaagtgattattttgtttatctgtttcttccaggaaaacatttaaagttgatgatatgttatcaaaagtagagaaaatgaaaggagagcaagaatctcataggtaagataacctatcagtttacattaagtgatatactttaggaaagaggaaaaattacagtgatcattttcctagtgatcaccttgatataaggagttagaaggaatcttagaggtcagtttggtccaaactcacacacaagtcagaaattaatttctgtagcattcctggcagagaatacttaagctgtggcttgaatacctccagtgtagttgtatttattattctttatctttattaccagtttcttccattttgagtgaaacctctgacttctgccgttggtcttaactctaccacctcatttaaagagggatactcacatttatagtatatgtgctaggtactgtggcagggacttcacaatatcacgtatcttgtaagttattctcaaatatgagaggggttctctttttttccatctttttcttctcatttaaatctgtcaggcaacatattcataacttttatttcatatttgaaatatgtttctcacatagtttcagaaacttgaacatttggacagaatctacttattgtacattagcaaatatatacctagaacgaatccctaaatgttctgactagtctgatatctgtctactctagatagtatgcttctatttattttttgatatgtaaactttattttttgatatttttgatagaaaattgaatattctaaggagaaacagcagcttgggtggtgtttgttcattcattaactacctttagagagaatgcagaactaaaaatattagattcttaaaaaaatagagttggaaaatttgtcacagtgcatttttcttttccttctagttttaaatcacagcttacgaatttagataggatacacacttaatgatgcatcatttatgcatctcattgttttcccattgttctgttaactggtaaaagacttcctttttttcagtttggcttccttctactttaagtttggctttggaattaagtgatttttttacttggattgtaaaatgatattttttattttatatcctgcaatcttgtggggttgaagtataatttatatttccatgtctaggcagtcctgacttgtaaataaactgtgatagtccattctagaagctgagatcctgaattgttacctggtacatctgttaatgcccagggaggaccctataagatagaactgagaatattcgcagtgcacacacatttttctttactagaatttgtattccagattcttgtctggtctcccaccctagacagagctcttgggatcctcagggccttttttacttaaaatacagactgtagtaagatcctggtctgacctccctgcttcttttctcctgaccacattaaaagtttgccctatagtcatttcagggttcaagtgagaaggaagcatgaaccaacaacaagaacactggacccttctcttcatcttcctcatcaaggtttaccttcactactaaaccctattactatctcattgtgacattgggtttgaaattacagagcttccctaagtaagagtgtgtgggagatacatactgttcaattctctctgaacaattgtttccccagtaattttgttccttttgacccagtggttcaatagcaactcaaagattaaaatcagagggttacataaattcctgctggtagttttggaagagaattttttgagtctttagggtctagctaggaccagtgagttggccatttaagcctctcaagattcttatgaatgtctcagtattgctcccagaagcactaagatgaattaagaaagtgtgtcattttaagtttactgctaagaccctacattattaactttctttaatctatttcttttttttttgagatggagtcatgcagtggtgctatctcagctcactgcaactgccacctcctggattcaagcaattatcctgcctcagcctcccaattacctaggattacaggcgcctgccatcacacccagccttttttttttttttttttttttttggcgaccgagtctccctcttgctgaggctggagtgcagtggtgcgatcttggctctatagcctccacctcccgggctcaagcgattcacctgtctcagcctcctgaagagctgggaatacagacgtgcaccaccacacccagctaattttgagtttttagtagaaacagagtttcaccatgttggccaggctggtcttgaacttctgacctcaagtgatccgcctgccttggcctcccgaagtgctgggattacaggtgtgagccaccaagcctggccaatttttgtatttatttatttacttatttattttgaaacggaggtttgctcttgttgtgcaggctggagtgcaatggcgtgatctctgctcactgcaacctctgcctcccgcattctcctgcctcagcctcccaagtagcagggattacaggtgcccgccatcacacccagctaattttttcttgaactcctgacctcaggtaatctgcccacctcagcctcccaaagtgctggaattacaggcgtgagccactgcgcccagcctcctttaatctatttcttatttcaaattaaggtaatcttatttttctcctaaacctatcacacagggttgtaagaaggaccctaaacaccagtatgtgatgccagcagtataaatatttgcttctaaaatctattgttaaattcttaaaagataacacaggccgggcatagtggctcacacctataatcccagcattttggtggctgaggtgggtggatcacttgaggctaggaatttgagactgccctggccaacaggggaaaaccctttctctacaaaaaacacaaaaatcagccaggcgaggtggtgtacacctgtaattccagctacttgggtgactgaggcaggagaatcccttgaacccgggaggcagaggttgcaatgagctaagattgtgctgctgcactccagcctgggcaagatgtgactctgtctcaaaaaaagaaaaaagatgataaatctttgttgttccataacattagttagtagaagttaatatcttaaatcatacacaaaagtatctctcctccatttatattcttttttttttttttcttttttgagatggagtctcgctctgtcacccaggctggagtgcagtgacgtgatctcggctcactgcaggctctgccccctggggttcacgccattctcctgcctcagcctcctgagtagctgggactacaggcgcccgccacctcgcccggctaattttttgtatttttaatagagacggggtttcaccgtgttagccaggatggtctcgatctcctgaccttgtgatccgcccatctcggccttccaaagtgctgggattacaggcgtgagccaccgcgcctggcatatattctttgtactatttcagtttaactgggtcctggatctgtacaggtctagtctgggagtcttccactagaattcatgttcttttagcactgccaaagttatagtatgtctgctcctgagcccaatatatttcattcctcaaagttcaaggggtatcaagataaaaataccatagtagtatggcccaaaagttagttcagtcaaataaatgcctgagtttattatgacgtttgtagtaatttataaactaaaccaagatatgagcattaatctgttcaaaagaagttggtgtttcagggtcttttatattttagacctacagttgtcttaagtcatttgcagaaacttgttggtggaaggagctgatagaaaaacatgggctattaaatggttattagttcttttttttcttttttgagatggagtctcgctctgtcacccaggctggagtgcagtggtgccatctcagctcactgcaagctccgcctcccgggttcatgccattctgcctcagccttctgagtagctgggacaggtgcgtgccaccacgcctggctaattttttgtatttttagtagagacggggtttcaccatgttagccaggatggtctcgatctcctgacctcgtgatccacccgccttggcctcccaaagtgctgggattacaggtgtgagccaccgcgcccagcctttttttttttttttttttgagacagagtctcacattgtcgcccaggctggagtgtagtggtgcgatcttggctcactgcaacctccatcccccaggttcaagagattgtcctgccgcagcctccctagtagctgggattatatgcatgccctaccacgtccaactaatttttatatttttagtagagacagggtttcaccatgttggccaggctggtgtcaaactcctgacctcaagtgatccttccaccttggcctctcaaagtgttgcaattacaggcatgagccactgcgcccagccttctttttctaagagacagggtcttgctctgttgcccaggctggagcgcaagtggctgctcactacagcctctaactcctggcctcaaaccatcctcccatcttagcctcctgaatagctaggactacaagtgcatgccaccatgcctggctaatttttaaattttcgtagaggcagcatcttgctatgttgcccaggctggtctcaaactcctggcctcaagtgatcctttcagattggcttcccaaagttccgggattacaggtgtaagccaccacgcctggcctttattttctttacagaaggtctgatataatgccttacatcctttccagctcttgtttctggtactccagttttgaatttttcttggattttgaccaggcactatggctgattagaataaatctcttgcctttgtgtagttgtatatgctagcgattcttatgctgtcctaccaattttggaattatcttttttttattgctgtttttttgagatggaatgtagctttgtcgctcaggctggagtgcagtagcgcgatctcggcttactgcaacctcctcttcccgggttcaagcagttctcatgcctcagcctcctgagtagctgggattacaggcatctgccaccacgcccagctactttctgtatttttaatagagacagggttttaccatgttggtcaggctggtcttgaactcctgacctcaagtgatccaccttccgtggcctcccaaagtgctgggattacaggcatgtgccactgtgcctgtccccaatgttggaattctctggtaacaactcttgagtgctgagtgcatctccatggactaaaatgcatcatgaaaagatttttaaagctgagttgcttccgagtgtttaccagggctaaacgaagcaaaatgtcacttctctcttgtccttattcctcttctattcctggtcttctgttagtagctggagaaaaatcccctcaaaggatacctgaattagaacttttattagggttattttcaagcatgtatttttattttttgagacaaagtcttgctctgtcacccaggcaggaatatagtggcatgatcttggctcactgcaacctccgcctcccaggttcaaacagttcttgagcctcagcctccccagtagctgggattacaggcacctgccaccacacccggctaatttttggttttttttttccggtagagacagggtttcacctattggccaggctggtctgaaactcctgacctcaggtgatccacccgcctcgacctcccaaattgctgggattacaggtgtgagccaccatgcctggccttatttttattttttgagacaaggtctcgctttgtcaccgaggctggagtgtagtggcataatgataggtcactgatggattgaactcgtggactaaagggatcctcctgcctcagcctcctgagtagctgggactacaggcatgtactgtcacaccacactaattttttgaatttttgtagagtcagggtctcaccatgttgcccaggccagttttgaactcctatcctcaagtgatcctcctacctcgacatcttgaagtgctgagattacaggaatgagcccccatgcccagcctgaatttttatttatttatttatttatttatttatttatttatttgagactgagtctcgccctgtcgccaggctggagtgcagtggcgcgaactcggctcactgcaacctctaactccttggttcaagcaattctcctgcctcagcctccggagtagctggggattataggcacgtggtaccacgcccagctaatctttgtatttttagtagagaaggggtttcaccatgttggccaggatggtctcggtctcctgaccttgtgatccacctgcctcagcctcccaaagtgctgggattacaggtgtgagccaccgtgcccggctcatttttatttttagtaggttgataagtcaatgtgccttttttgactatttatttatttatttatttatttttgagacggggtcttgctttattgcccaggcaagaatgcagtggtgccatctcggctcactgcaacctccgcctccagggttcaagctgttctcctgcctcagcctcctgagtagttgggattacaggcacacaccaccacgcctggttaatttttgtatttttagtagagtcagggtttcaccatgttggtcaggctggtctcgaactcctgacctcgtgtcctgcccatctcggcctcccaaagtgctgggattacaggcgtgacccaccgtgcccagccgactttttgtttttgatgcaacctaagcttttgaattagtaaccttccttttctaaacctccccgtttttaagcatttatttttacaataagaaggcctgcatctatattcttggttgcacgtttcatttccgtagtgtgcaatgtcctaagcactatactaagccctcgggtatataagggtgaacaaaatggatgaaggccctgcctttatggagcttagtgtttaggggagaaagacataatcatttaataaatatgaaataagtgctgggaaggaaaagcataagaaaactgtgagtgtataaaacaggagaaccagctttcatttgaggtgttagatttgggaataatgatgatcaggaaaggcatctctgaagaaataagctgagatttgaaagaagtgtacagaagtaaaatggggtgggaggatgaacaaataggtggttctagttaaagggaatattacatatacagcatttgatgccagagtagctgtgtagaaagagcaagtctccttgagagtggtatgagaagaagctggagcagatggccagggccagacagtgcattgtcttcaaggtaatttaaggatgttggtcttaagaaagtcgttcgttcttttttttttgttctctaagacgtggggtcttgttctgtcacccacacgggagtgcattgatacgttcatagcttactgcatcctcgaacttccaggctccgttgtcttactttattttttattttactttttagagatgaggatttgccctgtcgctgaggcggcagtacagtggtgtgatcatggctcaactacagccatgagctcctgggctcaagtaaccctcctgccttagcctcctgagtagctgggactacaggcacatgctaccatgtcccacttattttattttattaaaaaaagtttttttaggagacagggtctcacttcatcacccaggctggattgcaattgtgcgatcatgactcactttacccttgacctcctggcctcaaatgatcctcctgcctcagcctaccgaatagcctaggaccacaggcgcaagataccatgcctggatgattttgtaaaattttgtagccgggcacggtgactcatgcctgtagtcccagcactttggaggccgaggtgggcggatcacgaggtcaggagattgagaacagcctgaccaacatggtaaaaaccccatctctactaaaaatacgaaaattagctgggcagagtgtcgtgcacctgtaatcccagctattcaggaggctgaggcaggagaatcgcttaaacctgggagatggaggttgcagggaggagagatcgcgccattgcactccagcgtgggcaacagagcgagactacatctcagaaaaactttagtagagatccattatcttgtcatgttgcccaagatggtctcaaacttctggcctcaaacagtcctcctgtctcagcctctccaagcattgagattacaagtgtgaaccattaacacccagcctgttgttttaaaagttgtatattattattattattatttttttttttttgagacggagtctcgctctgtcacccaggctggagtgcagtggtgcgatctcggcccactgcaagctctgccttcccaggttcaccccattcttctgcctcagcctcctgagtagctaggactataggcgcctgccaccacgcccggataattttttgtattttttagtagagatggggtttcaccgtgttagccaggatgttctcaatctcctgaccccgtgatctgtccgccttggcctcccaaagtgctgggattacaggcgtgagccaccgcgcccagccaatattactgtttttttgagagggagtctcactctgttgccagcagtctcgactcactgcatcctctgcctcctgggttccagcaattttcctgcctcagcctctggagtagctgggactacaggcatggccaccatgcctggctaatgttttgtattttagtagagatggggtttcaccatgttggccaggatggtcttgatctgacctcgtgatcggcccacctcaacctcccaaactgctgggattacaggcataagccgccgcacccagtcagtttttaaatatatatagttattgtttctgcattgttctgtttcttctaacatcagaccagtagtacatatgatggttaggattgtaatctgagttccaggagcaggatgctgctctttggtcacttcagaacctcgagatatcaccgaaaaccctccctacccacctctgctattattgcacttctcgactagtattgtggtatgtaaaaaagtcattaaattcttaaattatttttttctctctatatatacgtgtgtgtgtatatatatgtgtgtatatatatgtatatatatattttttgtttttttgagacagtctcattctgtggctcagcaatgtcaccatctaggatcactgcaacctctgcctcccaggttcaggagattctcatgccttagcctcccaggtagctgggattataggtgtgtgccaccatgcccagctaatgtttgtatttttagtagagactagttttcactgtgttagccaatctggtcttgaattcctgacctcaagtgatccacccacctcgacctcccaaagtgctggattacaggcctgtgccagcgtgtccggccttattttattactattattatttttgagatagagtcttgctccattgcccgggctggagtgcagtggcacgatcatggctcactgcagtctcaacctcctgggatgaagagatcctctctcctcagcctcttgattagctgggactacctggctatgttttttgttttttttttttttctcttccagatggagtcttgctttgttgcccaggctgtagtgcagtggtgtgatctctgctcactacaacctccacctcctgagttcatgtaattctcctgtctcagcttcctgagtagctgggattacagatatgcaccaccatccccggataatttttgaatttttttttttgatacagagtgtctctcttcttgcccaggctggagtacagtggcgtgatcttggctcactgcaacttccacctcccaggttcaagcgattcttctgcctcagcctcccgagtagccgggattacaggtgcctgccaccacgcctagctaattcttttgcatttttagtagagacagggtttcaccaggtagagcaggctggtctcgaattgctgacctcaggtgatctgctcgcctcagcctcccaaagcgctgggattatagccgtgagccactgcccccagccggtttttgtatttttagcagagacggagtttcaccatgttggccaggctggtctcgaattcttgacctcaagttatccaccagcctcagcctcccaaagtgctggattacaggtgtgagccactgcacctggccctggatcaccttttgtactttttgttgttgttgttgagacggagtcttgctctgtcacccaggctggagtgcagtggcgcaatctccgctcactgcaaagttctgcctcctgggttcatgccattctcctgcctcagcctcctggagtagctgggactacaggcgcctgccatcactcccggctaatttttttgtatttttagtagagatggggtttcaccgtgttagccaggatgtctcaatctcctgacctcatgatccgcccacctcggcctcccaaagtgctgggattgcaggcgtgagccaccgcgcccagccccttttgtactttttgtagagatgaggtttcaccgtattgcctagtgtgactcgaagtactgagttcaagtgatctgcccactttgtcctcctaaagtgttaggataacaggcgtgagccactgcatccgacctattaaattatttttaagagaactattgtattaatgattttttcctacttttctattttgtacatttagctgcattttaaaatctttaggctggccaggcatggtgactcacgcctgtatcccagcactttgggaggtcgaggcaggcggttcacttgaggtgaagagttcgagagcagcttgaccaacatgggaaaaccccatctctactaaaaatgcaaaaaattaggccaggtgcggtggctcatgcctgtaatcccagcactttgggaggtcaaggcaggcggatcatgaagtcaagagattgagactatcctggccaacatggtgaaaccccgtctctagtaaaaatacaaaaattagctgggcgtggtggcacgtgcctgtatttctagctactcgggaggctgaggcaggagaattgcttaaacctgggaggcggaggttgcagtgagccgagattacaccgctgcactccagcctggctacagagtgaaactctgtctcaaaaataaataaataaataaataaaaaattagctgggcatggtggcgtgcacctgtaatttcatctactcgggaggctgaggcaggagaattgcttgaacccaggaggcggaggttgcagtgagtagataccgcaccactgcactccagcctgggtgacagagggagactccgtctcaaaataaataaataaataaaatctgtagactacatcttaggttggttgtgtgtctttcccaccattaataagatctgatgttttccctttcttttttttaatacactttgccttgactataagctttgaagttgttttcaaattgtcatcttttcagtcttgagtttttgttcttttttcagaacctggctatacatttctttttgcatacttactcttgaaggtgcctcatcagttgccatttgagcatatctgattcttaaaaatttgaatattcaagaacaaattgtaaaaatattccttgtataatttttttggttttgtagtaattcctttgttttcttcacagtacttctgcagagtgatccatttgtaattaatagacacacacacatcatccaccattcagctttatcttctcattagaaagtgcgtctaacccctatattttgagatcctggatttcagaatattggacttgatgtagacacgagtttctcagctttacatatcataggatcaaatgtatataacaaaagttgaatagctaacatgtaactatagaaaccaagtagattatcagacttgtcctgttttgaggtaatactgccatacccttaaaatgaagccttatgcctgccgctagcagattgatgtatataaattagaggcactaatcttggtctcctgttgtcataaaaactacttcctctgtgggatctggctgttcttaaaatgggaggctcttccttgaattagatttcaaagtgttagtctcttatgaattagcttagcatcattttctgtagaccgtatcagaactgtcagatgtttgtgcttggaatgctgaaatttgcgtctcaaaatttcaaattctctacctgatttcttgttatcatgtggcttacttcctgagaagatacagggagcatgtgacatagatgaactaagtctcttatatcttattctggtcatgtaaactagattttgttgtggcctaaaaccaaatagtcctgaccaaccttacatgtttcttttcctcccgttcatctggtccagcctaaccaattaagatgtggacaaagtagctgcaagagaggggagagggaagggagagaaaactttgcccttttccttggaacaaaccacctatggaagggatcattggtacactttattctaggtacatatcagagcgtttactttttttttttttgagacggggtctcgctctgttgcccaggttggagtgcagtgacgcaatctcggctcactgcaacctctgcctcccaggtttaagcgattctcctgcctcagcctcctgagtagctgggattacaggtgcctgccaccacggccagctaatttttgtgtttttagtagagatgaggtttcaccacgttggtcaggctggtctcgaactcctgaccttgtgatctgcccgcctcggcctcccaaagtgctgggattacaggcgtgagccactgcgcccagccagagtgtttacttttaggtgaggaaggggaaatcatgcatagcaagtcacattcccaatgtcacctttatttattatttatttatttatttttgagacttgctctgtcacctaggctggagtgcagtggtgtgatcttggctcactgcaatgtctgcctcccaggttcaagctattcttctgcttcagcctcctgagtaactgggattacacgcaggtgtcaccacgcccggctaattttttgtatttttagtagagacaaggtttcaccatgttggccaggctggtctccaactcctgacctcaagtgattccccctgcctccttcccaaagtgctgggattataggtgtgaatcaccgtgcctggccccaatgttgccttttaaaattggttaattgaaatttagaattctttctcaaagtccgggcatggtggctcagacctgtaatcctagcatgttgggaggctgaggcaggtggattgcctgagctcaggagtttgagaccagcctgggcaatacgacgaaacctctctctactaaaaaatacaaaaaattaactgggcatggcagcatgtgcctgactcccagctattcaggaggctgaggcaggagaatggcttgaaccctgggaggcagaagttacagtgagccaagatcacaccattgaactccagcttgggtgacagagcgagactccgtctcaaaaaaaaaaattctttctcacaaagaaacactagtataataatggctggttggctgggcccattactcatacctgtaatctcagcactgggaggccagggcgggtggatcacctgaggtcaggagttctagaccagcctggtcaatgtggtgaaacctcatctttactaaaaataggaaaattaacctggcatggtggcgggcacctgtaatccctgctactcagagactgaggcaggagaatcacttgaacccaggtgggaggttgcagtgagctgagatcgtgccactgcactccagcctgggctacagtgagactccgtctcaaagaaaaacaaaacaaaacaaagctggttatacaggctatcctatgtaaggtataatgtaccatttaaaactgtctgaaatcacctgtggtgaaagatcattttgtttatttgttaattttcagtgtgttgttagtagtattctcaagttcttgagttgttgtagaatggtaacatttttcctaatgacctcagtttgtagacaacattttaagtaatactgatttaaaatattctctggggtaaataaatgtaagatctttctggcatttcagagttggagcttaccctcacacttctcagaaaaataatgtaaataatactaatagtactgcagtgtaatgggccatcattcctgacctttaaatttgtattactctaggaggacgttatcttatgaaaaaaatttgttgggtcattttctgtaagacactgctaggtgctagggacactaataaaaagatgtatatggaaaaatagtgactaaacagtggtaaataagagtgcttgtaaagggataaagtggtcatttagctcttgattgattgggtttagggtctttgtagaagagggagagagtattttgctggatactttattactttctgcaagcctgactgcgcaatggcgcagtctcggctcactgtaacctctgcctcctaggttcaagcgattctcctgcctcagcctcctgagtagctgagactacagccatgtgccaccatacccagctaatttttgtatttttagtagagtcggggtttcaccatattggccaggctggtctcgaactcctgacctggtgatcccctgcctcggcctcccaaagtgccaggattacagacgtgaggcactgcgcccggcccacactgtagtttttttagcagacagtttcatggcctacttcactaagtagatggagatatccccccatcttccatggaaatgactttcttacttgcctcttatttctctatcttagaaaaagaggaatccagtcgggctcggtggctcacacctataatcccagctacttgggaggctgagacaggagaatcgcttgaactcgggaggtggaggttgcagtgagccaagattgcgccattacactccaacctgggcgagaagagcgaaacctcatctcaaaaaaaagaaaaagaggagtcctggtcaaatttacagggctaacctcttcataatatgtccttatttccagtcattacttgctccttagtactctcttgccacaatatctttctgtaactgttcccatctgactataaaaatgcctagattgtcaccatcatttaaaaatatatatatatgccctttactagtccttagtgcccagcaactatttcattagtaaatgccttatgtaagggatcagtactgctttcctttccccaccatctgttctgtatagccctccataatctggtgtctgtacatgtcacactatggaaactatgctcaggaaagttatgaatgtctcctgatcaacagctgtattctgttttgcagtttaaaggtacttcaaaagcttattggtgcttctgtttgttttatcccatccttatagtttttttctattgttaatagatgtttgtgaaaatagaaggagcactagttctagttcatgctttcttttgcttttccatagcttctaaaactaacagtgaaaatgatatattgaaacagtaaattatagatctataccagatttgtaattgtgtatttcattgctatttgaagtataaagtaatggttctgtataatttattgggaaggttgaatttccatagcttcaaaatattcaaatttttttgcatggatttagctacccttttcaaaatttccttttgatgaagtcattgactaaagcgtcattaaaacagaacaagaaaagaattccaaaaaccctccaaaattcctttttaaagataggaaggcatacctgctgtcattttataggtagaacactaaaacacagtaaattacctggcctccaacttggtagtctgattttttctgccttgctctggtgtttttgtggttttgttcttactttttgtgagttgtgagggattttttgttgtttattttttgttaggtgtatagacaaacttttggatgtcatatttaacagggaaagcatagagtcatgggcctgaataacaattgagtacaaatatttataaattagttgaagtaactttgatttcaatgttatattttaaagtctaggttattttactacagagcattaaaatgataaaatatttccttttttttttttagcttgtcagctcatttgcagcttacatttttggtttcttccacaaaaatggtatgtacttaaaagtaaataaagtggcattttaatagcaagatacctttgtgaatgtaaaaaaaaagtggggcttctgagtgtaaatttataaaattaagtttaatggaaaagatgttgattctgatgtttttgagctttaaggtatgaaggctaatgatgaaatttgtttttggtgggtgggtggtgggggaggcagactcttgctctgtcgtccaggctgtagtgcaatgttgtgatcttggctcactgcagcctccgtctcccgggttcaagcaattctcctgcctcagcctcctgagtagctggtattacaggcacgcgccccatgcctggctaattttttgtatttttagtagagacagggtctcaccatgctggccaggctggtcttgaactcctgacctcgtgatctacccgccttggcctcccaagggggcgtgagccaccacgcctggctaatgatgaacattttaacaaattgtcttagaacttcaataggtaaagaatctcctcagtagaaccttttatgcataaacattttgaattactgataatgtatcatgtttttaaaaaacacagtaaaacaactgaaataaccactattaccaatggcatatattaatattttaaatattattcaaaggaaattatatagtatattactcccgtaaaagctcaaagcatgctggaaagaattagagttgttttaaaaatggaaaaatacggccaggtgcagtggctcatgcctgtaatcccaacattttggaaggctgaggcgggtgtatcatgaggccaggagttcaggaccagcctggccaatatggtgaaaccccatctctactaaaaatataaacattagccgggcgtggtggtgggtgcctgtagtcccagttacttgggagacttaggcagaagaatcgcttgaacctgagagtcagaggttgcagtgagctgagattgtgttactgcactgcagcctgggcgacagagcgagactccatctcagaaaaaaaaagggggggaaaattacttatcagcttatccatcataagtctgtgtatatggcatatatttttattatgcaatggaataaaaccattattagaaacatgccaggttggttgtcttggtatcgtttagtaagaaacaaagattgaaaatgagtcctggtgggccgggcacggtggctcacgcctgtaatcccagcactttgggaggccgaagcgggtggatcacaaggtcaggagattgagaccatcctggctaacatggtgaaaccccgtctctactaaaatacaaaaaaactagctgggcgtggtggtgcacacctgtagtcccagctacttgagaggctgaggcaggggaatcgcttgaacccgggagttggaggttgcagtgagccaagatcatcccactgcactccagcctggtgacagcgagactctcttaaaaaaaaaaaaaaaaaaagaaaagaaaaagaaaagaaaatgaggcctggcttggtggctcatgtctgtaatctcagcattttgggaggctgagatgggaagatgacttgaggccaggagttcaagaccagcttgggcaacacagaccccatctctacaaaaattagccaggtatggtgggtatgtcctgtagttctaggtacttggaagtccaagatggcaggatggcataagctcaggaattcaaggttacagttacctatgattgcacaactctactccaggctgggcaacagagtgagactctgtctccaaaaaatcccaaatattagactgggcatggtggctcacagctataatgtcaacaccttgggagtctgagatggaagaattgcttgaggcttgcctgggcaacatagggagaacctatctgtaagaggtaaaaaaagattaactgggcacagtggcacatgcctgtagtcccagctgttctgtagtctcagctactcaggaggctgaggtgggaggattgcttgagtcttggaggttgaggctgcagtgagccaagatcacaccactgtactccagcctgagtgacagagtgagacactgtctaaagaagacaaaaagacaaccttgccaattggccagttgtcaaaatgctctaatataaccattttttaatgactctttggggttgtttgtttgtttagacagagtcttgctcatgtcacccaggctggagtgcagtggtgtgatcaactcctgggctcaagtgatcctcctgcctcagcctcctgagtagctgggactacaggcgtccccaccatgcctggctaattaaaaaaaattttttttgttaagatggaatctcactacatttcccaggctggtctcaaactcctggtctcaagtgatcctgtcacctcagtctcccaaagtgctgggattacaggtgtgagccactgagactggccctagttagggtttttatgtaagaaatttgaaatctcgtatttgtattagcagctaatgtaacttctagtttttaccttagatctggtctatttttatatagaagtaacctgggtagcattatgatttttgttttccttaaattatttgtaatggtctgcttagagtccttatctctagtcatcgtattttgttttctgtggtacttctgacgtgtctagactttaattcttcagaagcttataatttgaaatttatacattcattagccctttgttctcagggacctgtgtagaacacatagtttatccatcactgaactttttggaaagtagtcatattaagcttttttcctatctacatgacaaaatatataaagttcaacaattgctcagatttactttgtttttatttttcttgatattgaagtaaaagagatagtgaactctgttgatatctgtttccagaaaataattcctctgtcacccaggctggagtgtagtggtttgatctcagatcactgcagcctctgcctccaggttcaagtaattctcatgcctcagcctcccaagtatctgggattacaggcgggtgccaccacactagctaattttttttttctttttctgagacggagtttcgctcttgttgcccaggctggagtgcaatggcgcaatctcggctcaccacaacctctacctcctgggttcaagcaattctcttgcctcagcctccagagtagctggtattacaggcatgcgccaccatgccccgctaattttttgtatttttagtagagatggggtttctccatgttggtcaggttggtctcttgaactcccgatctcaggtgatttgcccgcctcggcctcctaaagtgctgggatttcaataggcatgagccaccgagcccggcccctaatttttgtatttttaatggagacaggatttcatttcaccatgttggccagtctggtctcaaactcctggcctcaagtgattcgcccacctcggcctcccaaagtgctgggattataggcgtgagccaccacgcctatgttgaaaataatttctattataactttgaaactagtagaagttggaagtagatatattgtgtttcttttccatccaaggtttatttgtaccttttttgttttcaataatatttttaagaaaccaggatagaaaaccaacatcaagttctctaaaatgtaccagcagcagtgatgcttgcctgtatttccagctactgaggaggctgagctgggaggattgcttgagcccaggagtttgaatagagtctgggcaacatagtgggaccctctctcaaaacaaggaaaaaaaatttttaattcttaaaatgtgattttttcttcttattttcttactattattttttagacagagtcttgctctgtcacccatgctggagtgcagtgagcagtcttgcttccttgcagcctcccgggctcaagcgatcctctcacctcagcctcccaaagggctaggattacaggcatgagccactgcatccggcctcttttgtttttaaatgaaaacttttgtttggcaattaatacttgaaactgcttcttagaatgaatacacaaagattatttgggtactattttcatggtgagtattgttcggcaaatatttttgttactgcatttagacattggactatttttttgctgtattaaggtgtttttatcctggatgcaacttccgaagaaactgatcaaatgtgttttacacacacacccccaataagaatgtttttaagtagaaaaaaagtgttgccggccaggcgcaatggctcaggcctgtaatcccagcactttgggaggccgaggcaggtagatcacctgaggtagggagtttgagaccagcctggccaacatggtgaagccccgtctctactgaaaataacaaaattagctgggaatggtgtttcatccccgtaatcccagctactctggagattgaatcatgagaagtgcttgaacctgggaggtgcaggctgcagtgagccgagatcgtgccactgcattccagcctggacaaccgagtgagactgactcaagaaaaaaaaaaaaaattacccgggcttggtggcgtgtgcctgtagtcccagctactcgggaggctgaggcagggagaactgctttaacccaggaggcggaggttgcagtgagtcaagaacattccattgcactctagcctgggcaacagagcaagactctatctctcaaaaaaaaaaaaaaaaaaaaagtaaagaaagaaaaaatgtgttgcccaatgccttagaacaaaaatttttttttgtatgttcatggattcatctattataatagttctggatgttattgaagctatttgatgaattatttattaaatattcagttatgaactgttaatacctttgggactttaaaaaaaagttatggaggactactctagaaccttaatttgtaaagcctttgttagttaatttacatagagaatatagactatggtattcaaaattaacacccctaaattttttgtaagccaagatattcttctagatagtaaataatatcttgatttttgttatcccatttaaactgtagagaaattctggggaaagcgtctaaaaatagctctgtctctacgttttataatgtttaatgttttttgaaatccattttttatccttttggccacaagtcttggtcagatcaagaactttttagtttagttgtctctatgcattcataatgaaacatgtataatagtaactgatttaattcaaatgttatcttaataatttttctagtagattttaggagaagaaaaaaattgaagatgcttattttgaatgtggttgtctcctgcaacttttttttttggagatggagtttcgctcttgttgcccaggctggagtgcaatggtgtgatctcggctcactgcaacctctgccccccacccctggttcaagcagttctgcctcagcctcccaagtagctgagattacaggcgtgcaccacctgtaatctgttgttgtatttttagctgtaggctgatgttgtatttttagtagagacggggtttctccgtgttggtcaggctggtctcgaactcccggcctcaggtgatccacctgccttggcctccctaagtgctgggattacaggcgtgagccaccacacctggcccttctgcaactattttcatttatgctttctgccaagaagctttaactgtatttgtcaaaattacttttgactagcagtgtattatcataaatgttgaatcttcaagccggcccagttgcatgtgcctgtagtctcagctacttaggaggcttaaaatgggagaatcacttgagcccagaagtttgagaccagcctgggcaacatagccagacccttgtctgaaaaacaaacaaaaatattaaatcttcaaattagaaatattcagtaaatatggccaggtgtggtggctcacacctttaatcccagcattttgggaggccaaggcaggtggatcacttgaggtcaggagttcaagaccagcctagccaacatggtgaaaccccatctctactaaaaattaaaaaaatcagctgggtgtcgtggtgcgcacctgtagtcccagatacttgggaagctgaggtaggaggatcactttaacccgggaggcagaagttgcagtgagccaagatcgccctactgcactccagcctgggtgacagaacgagtctctgtctcgaaaagaaaaaaggaattaggaagtatatatatatataaatggaaatgtgtagatgtgttttagagacaggatctcactctttcgcccagactagagggcagtgacaggatcatagctcactgcagccttgaactccttggctcaagagatccttccacctagcctctgaggtagctaggactacaggcacatgacacccaccacacccagctaattttttgacattttgtatagacgaggtctctgtgttgtgcaggctggtcttgaactcttggccttaagtgatattcttgccttggcctcccaaagtgttgggattacaggcatgagccactatgcctggccagtgaatattttttatacttacaacctgggcatggtggctcacgcctgtaatcccaggtactcaggaggctgccgtgctgatgtgtgaggatcacttgatcccaggagcttgtgattgcagtgagctgtgattgtgccactgcactgtaccttgggcaacagagcaaaacctatatctaatggaaaaaaaaattacagcatataggacggtaattatatttgttttgtgagtggtttatttacactatatataaaggcttttaaagagtttgctgtaagtttggaactgatttgaggaaaaaagaatgagtgaacttttgagaagtcttattatgggaaatctctgtttgaagttccctgacttgttagcaaaatgaataccgtgttcatatatttttaaaatatattttaaaatactgattttctatttagataagccatcaccaaactcagaaaatgaacaaaattctgttaccctggaagtcctgcttgtgaaagtttgccacaaaaaaagaaaggtaatgtcaacaaaatgatattggtagattaaatggaataatttgcttaattggacatctttatgcatatatattgtattttaaagctgagttttaaattttgaaagcttaagaaatgtgttgatggcctaattataaaactgataacctcttttgccaactcgcatatctgtgtagtttttctagtcttttaataagtgtctgtacaaaacttttctcataggagtctggaaatggagaagctgtgttttagcatctggcataaattcagttgcttttctaccatttcaatctgttagcgtatttcttagctatttgtacccattgacattttagataagagctaagagagagttttttccacaagattatcctttgtaacactgctctcaggcaaagaaattttgttgtcagcgttattagccattcacttattagtacattgcttcaaatttttataaggtgaagttatttcaccatagaaacaagtgttaagatgtttcctggtcaaccgatcaaagccaacatatgtacctttagttgcctcaagtcctcgagtgtttcaagaggagtaggaactggtctgggtccagggtcccagtgctgatattcttccaagaccataggccataagggcctcagtcacagggagggagtagactaaggcaccatggaggcagcagtggaactttatttttgaaagtttatgtaaaggccggttgccgtagctcacacctataatcccagcactttgggaggcagaagtgggcagattgcttgaacccaggagttaagcatcctgggcaacatggcgaaaccctgtctctaccaaaaacacgaaaatgagctaggcatgatggcctgtgcctgtagtcccagctacttgggaggattgcttgagcccagtaagtcgaggctgcagtgagccatgattgcaccactgagctccagcctgtgcgacagagtgaaactgtctcaagaaaaaaaaaaatgtatgtaaagttaggaaatatcactccttgccaggtgctggtggctcacgcctgtaatcccagcactttgagaggccaaggtgggcagatcacgaggtcaggagatcgagtggctaacatgctgaaatctcgtctctgctaaaaatacaaaaaattagccaggcgtggtgacgggcgcctgtagtgccagctactcaggaggctgaggcaggagaatggtatgaacccgggaggcggagcttgcagcgagccgagatcgcaagactgcactccagcctttatcgcttcttactcctacctaaccaccatacacattacaagtgatgatatgaaaatccaagatacattacttagaataagatatgaatataaatatagtcattcttatgttcaaaaaaatgtatcggggtaatcattttcctggaagaatatacacagccaactgctagtattagtcatctctggagcgtaagacctgggggtgggtgagaattcatagttttcactttatagtcttataaaatagaaatttttttagactgtatgtattctatttattttaaaagaagtagctgctgtaagatactgtcataaaagtcttctgatccttccagtttttctagtatgcattttcagtgtaactaatcatactataacagaatattactcagaatatgatcattggtagataaaaccagttttgtttttgtttttttaaggatgatgatcctttctgttaaacaacatattttaactatatggatttactgtttcataatgtagttgttgaccatgggattattagtcatttttttaatttctaatggtcctattagtcattgtcatgttaaaatagaacatttaagagatttgataaaagtacatgagtttaacattttagcctggtttttttgttgttgctaaaaagccttaccagagagatttagcatgcttttaattctaaatttctaatatacaactgtttcagatcactgttagctaaatattagatgtactgtatcataatttcattatgttggagaaaacctcaattgctttaatatttggaatataggtatttcaaatgtttatttttgcttcacagttttcagaactatggttagaattttaacattccatttggtgatcatggcctatctcctgtgtttcctatagctgtgattagaatttttattataattcttattgcttatatacaaataaatataaattaataatctttacctttgcaggatgtatgttgtccaataaggcaagttcccacaggtaaaaagcaggtgcctttgaatcctgacctcaatcaaacaaaacctggaaatttcccgtcccttgcagtttccagtaatgaatttgaacctagtaacagccacatggtgaagtcttactcgttgctatttagagtgactcgtccaagaagaagagagtttaatggaatgattaatggagaaaccatgaaaatattggtaatttttttttttactagattttatcactggagattaagatggtcattgaaaatgattgtaccagtgttccttcatgatagtcatggtgctgagtcttaaagcaaacagtgaattcacctccacctcaacattttgttgtgcaaattttcaaacataaaggacaatgagaagtattttatagtgaacacttatctacttacctcttagattcaacaatgaatattttattatacttgttgcatatttatccccctacccatccctcttttcttccaacaattgtgaattcatctttgaggtattcattcaacaaacacataggtgctggggatgatttaatttaatcgaagatgattaaagcattcagtcctgtcctccaaagtctcacaacctagtgtagggaaatagacatgaaatatatcattgctgcaaaatgatgagtggcataatacaggtatatgtgaagttcagcagagaaacacgttggaagaaataatctttgactcttgaagtattgtttgaagtttttgggagttaccacgagtgagaaggagtttgcctagcaaagataattctaaacagaaacattagcatttgcaaagatgtggggttaatgttgtgagtgttaaaaagaacatatagtaaaaatgcaaaattggaaacgtggtctgtatattattgcaactttagtgtaattcctacctcatttgggataaatgtagcatgttttatgttaagggaccatatatcgtaacacatttttgttctaatatttgatttatgagaaatgtttgttaaatttagatgtcagtgaagagcttccagccagaagaaaatgaaatcgtgaggatggggaaaagacatttgttgcacaaatgacagtatttgataaaaacaggtaatgttgatgaacaagcgaggctcccacaatgttctggaaatgttttcattctgaagcagaatataattatttatattgattatttcattgcctttgtttctttttattcttacggatgaaaaaacaaatttgcaaacactgaatttttgtctgtttcatagaaaacaataattaaggaactatttgcatagatagctcagttaaacttacttatttggcgaatattttgagtgtctgctcttttccagacactgttctggacattaaggcaacaaaatccctgccttcaccatggagcttaacttttagtggaggaaacagaccaccacccaaaaaatcaactgatgtcacttagtgatgagtgttgtgaagaaaaatagagaataaatggttactgttttagagcgatatcctctgggaggaggtagtatttgagaagagacttaaatggactgggccgtacgtaaatcttggggttatgtgtttattaaaaactaaggaagaggagctggtcatggtggtatgtacctgtagttccagctacataggaggctgaggtgggaggattgtttgagcccaggagttcaaggcagcaatgagctatgatcatgccactgtactctggcctgagtgacaaagtgagatcccatcttttttttttttttttttttttaggctggagtctcactgtgtcacccaggcaggagtgcagtggcgcaatctctgctcactgcaacccctctgccacctgggtttgagcaagtctcctgctttagcctctggagtagctgggactacaagtgcgtgccaccacgcccggctaattttttgtattttcagtagagacggggtttcaccgtgttagccagaatggtgtcggtctcctgacctcgcgatccgcctgccttggcctcccaaagtgctgggattgcaggcgtgagccaccatgcctaggcgagaccccatcttttttaaaaaaagaaagaaggccgggcgcagtggctcacgcctgtaatctcagctctttgggaggctgaagcgggtggatcacgaggtcaggagtttgagaccagcctggccaagatggtgaaaccctgtctctactaaaaatacaaaaattagccgggcacggtggtgtgtgcctgtaatcccagctactcaggaggctgaggcaggagaatcgcttgaacccgggaggcagaggttgcagtgagccgagatcacaccactgcactccatcctgggtgacagagcaaaagtctatcttaaaaaaaaaaaaagaaaatcatgtataatcattgtgtacctctgtgcatttggtacaggatggcaagaaacacagacgtacaataatttctgcaatttctttttggaaacgaaatattttagtgaaaatatcaccagtgaaagaatgtctgggaagcaaatccagcgttttttctttttgggattggagaaagaaacctatgccgtcatttcttgtaccaggctgcgtgctggtagttaacagtttattgtcaggtataggacaaagaaccagggaaagtaactaggccattcctcctattgtttattttttatttatttatttgtttatttttgagacggactctcgctgtgtcacccaggctggagttcagtggcatgatctcagctcactgcaacctctgtctcctgggttcaagcgattcacctgcctcagcctcctgaatagctgggattacaggcacccgctaccatgcccagctaatttttgtgtttttagagagatgaggtttcaccatgttggccaggctggtctggagctcctgacctcacatcatccacctgcctaagcctcccaaagtgctgggattacaggtgagccaccgtgcccggccagtgtctttttaaagtcagaaattttattgtggatcgaagatttaaatggaaaacaatagaaccataaatgtactagaaaatagtggtcatgtctgtgggggaaacaattagaatgaggcgcattggacttcatcgatgctgttaattgttctattttaggcagcatggggtatgttctgttttcttttttaatcactgtacctgacacatatgtttacacatttcttgtaagaaaaagataatgcttttattttaaagaaaaagtgccaagaagaaactgggagaatttccccacagcagcttattttgaaaatactcatccgggcatggtggctcacgcctgtaatcccagcactttgggaggctgaggcgggcggatcacgaggtcaagagatcgagaccgtcctggccaacatggtgaatccccatctctactaaaaatacaaaaattagctgggtgtggtggtgcgtgcctgtagtcccagctactcgggaggctgaggcaggagaatcgcttgaacccaggaggcggaggttacagtgagttgagatcgtgccactgcagtccagcctggtgacagcgagactctgtctcaaaaaaaaaaaaaaaaaattcaaaactataggaaagttgaaagaatactaaagtcatttaatatccacatacccttcatctagattgtatctgttgttaacattttgccacatttgatttatttatgagtatatattttatttttgtgctgaacaatttgaaagtttgctttattcctcatttataaactctcttgcatgtatctcctaagaacgaagacattttctggtataaccaccatacacttatgaggaatattaaaatacaaatacaatactatctccccagttgacctcaataatgtcctttataatttgtcctgtccccaccctgattccatagctagatgtcatagttcttcagtctccttcaatttggaatagtcccctagcctttctccctaccttctgtgacatttttcccccagtataggcctgtagttttgcagaatgtatctcaattaggacatctgtgatgatttcctcttgattagcttcaggttaaacatttttggcagggattctaatgagtgatgtgttttttacgtactacatcacagacgaaaggtaatgttaggtttgatcactccgttaagatgctgttcacaatatttctccattgtaactactttttttcccttttatataaatcagcatataattcttatgctaatacatgaagctgagtaaatatccattttcttcccatagcctgtcacccaatagttttagcattgattatttttgcttgaataaattattcctttggcagttggaaaatggtaattttctaacatttcttccacatttatttgcatttttatataaagaagagcattcgttctctgctcccactgcttcacttgactaaccctaaaaaaatatatatatgtgtgtatatatatatagagagagagagagagagagagagagagagaaacaggcaggcatggtggctgatacctgtaaccctaacactttgggagtccaaggtgcgaagactttgagcccaggagtttgagaccagtttggacaacatagcaagacctcgttcctaaaaagaaaaaaaaattttagaaaaagttacatgtaaatttaaaaagaagagcattcctttccccagctttgatattttaaaatcagtatggattaacaaattctatttattcaattagttttaatctactgatactgttattttaatgctcaaattgtctcatattttgtcaggaggagcccttctaagtaggcttctgtgtcctgttttgttgctgctattttttcctgattttctagaatagtaacatataccagaatcaccttctccttttttttttttttttttttttttttgagacggagttttgctcttgttgcccaggctggagcgcaaaggcacgatctcagctcaccgctacctctgcctcccgggttcaagcgattctcctgcctcagcctcccgagtagctgggattataggcatgcgccaccatgcccggctaattttgtatttatagtagagacaaggtttctccctgttggtcaggctggtcttgaactcccgacctcaggtgatcctcccacctcagcctcccgaagtgtggggattacgggcatgagccactgcgtcgggccaaccttctcttacctctgctctgaagttgtgatttcttcaaggagtcctgattccttatagaagaatagtatttttaagccaaaatctgcatgttagatgtgtaaaaattgtttttaaaatctcacagagggctgagtgcagtggctcacacttgtaatcttagtactttggaagaccaaggtgggaggatctcttgagcccaggagtctgaggctgtagtgagctatgattgtgtcactgcactctagcctgggtgacagagcgactgtcaaaaaaaaaaaaaatccagttaattccttgaaataataaccagtattcaaaagccatataggaaaagaatgcaaagttgaacaaaataaaaatcaaaaacttcttcagaaaacaaaaatgccaccataaccaaagtcaaaaatgacaagatggggagaaattattttcaacttgtctttcaggtagatgtctcatacttgaatgtaaacaggtcatactaattttaaagttgcccaatagaagaatgggcaaaggaaacaataagaagtttaccaaaatagatatatatggttcttaaacaattaaaacgataaaacatctgaattaaaagtacactgagatgcgttttttcacttatcagattgacagagaccaaaaaacttgataaagcacttgatcaggctgtgggggaaaggtctccacatacattacagataggagggtgcattggattgtaggtatcaaatgtacacccacaaaatggaatagtatgtatctacgtaaaagcataaggaagctcctttttgatttagaaatatatgaatttattacctatttgaataaataaattagtttttaaaatagttgaatggctttgctgatgtactattgaagttgactaaatttaagtagtacagcatagagaaaagacaaaaattcttaagtgtcaatcatttggttttaagagactttagagacagacacctggattcatttgctagatctggctatttatggtttgattttaaggcaagttatttaagcttttcttgcctcagttttctcttctggcagtggagtaatagtacatagttcatagtattgctgggaagattaaatgaaccatgtaaaatgtttataatagtgcctggcacatagtgaacactcaataaatgtcagctgtttttacctaatagaatttctccaagagtgatgaagagaagccagttgcttgatatatacagttaattactgagtatggttgaagaatggtgtttagtagtggttactagtgtttaaagtatggaaaaataagttatacatagacacatatgtacacacaccttaaaactatattgtgtgaatatatttgaattatttgattcaattagtattccatgaagtatttattgagcacctatatgtgccaggtgcccccagaattccatagttaccagattcatcattataataatcagtttactggtcaagtatacaagtaaaggattctagttcaaacaattacagtagttaaaggtaacagaattcttagtgtttccctaagacaagcattgtaacactgttatcctatttttaaaaatataaagcctgggctgtgcgcggtggttcatgcctgtaatcccagcactttaggaggctgaggtgggtggatcacgagggaaggggtttaagaccagcctggccaagatgctgaaacccgtctctactaaaaatacaaaaattagccgggcatggtggcacgcgcctgtaatcccagctactcgggaggctgaggcaggagaatcgcttgaacctgggcagcagagattatggtgagtggagattgcaccactgcactccagcctgggttgcaacagagcaagactccatctcaaataaataaataaataaagcctgtacttatgctttatatttaatgttgacaacgtaccaggttttgagacctcaggcatattatactttacatgtttagagttatatctgagtagctacagtaatgaattcctagtaatacagtttttagtgtacatcattaaaattgctttcatcaggactgcagtgtagctgtatttttaaaatcttgttgagtatgtaagctagtttataaatttaataaatggttttagtataaatctaaagatgtagaatttgtgtacttatagtaataacacaggttactttaaagtatatgtgtttgtctaacaggcgcttacagcttttagatggggaatatgaagtagccatgcaggaaatggaagaatgtccaataagcaagaaaagagcaacatgggagactattcttgatgggaagctatggactacttagaaggttgagcacattatagttatgaactcccatttttgattgatgttttcttccccaaatgctaattcatgttggaagtagaggcctttgttttttatactttaaaaaacacaagtaaatgatctagtcagagcatttaacggaaggtatcattccttttttttttttttttttgagggggagtcttgctctgtttcccaggctggagtgcagtggcatgctctcagctcactgcaacttccacctcccgggttcaagcgattctcctgtctcagcctcccgagcagctgtgattacaggtgcgtgccaccacgcctggctaatttgttttattttcagtagagacggggtttgaccatgttggccgggctagtctggaactcctgaccttgtgatccgcccaccttgacctcccaaagcgctgggattacaggcatgagccactgcacccggccacacggaaggcatcatactttgagagccagactgcctgattgaaatctctgctcctagctatgtggcatttggcaagttatttatccatgtctcagtttcttcacctgtaacatgagacatagaattgatggattagatgaaataataaaatatttagtacagtgcctggcatacaataagtgctcaataaatgttaacggctattttaaattctattcattgtaatggcagataataagggatgactagtaatacatttatcaagaaatctgcagaatttagattaagcatacttaaaataactcttaagagataaagaggaatccatacatttcttaaatagggagattcaaaactgtaatgatgtcttttatttctaaatatgttaggtcagtgtaccatccgatgcaaaatctcataaggatttttttaagtcttaaaattagttcctagttaatctaaaaggataagtatttagtaatactaagggaaattttagaaaaatattttgagaatttttacttaccagttttagtatgatatacaatataccgttgtacataccataaagttaagagaacttaaaccctatggtataaccataggaatagatatgcttatctattcaggcatagtcctgaaatagtttatgataaaggtgttggtatagctatgtgagaaagagaaactgttcattaattgtgacaactcttctccagtcatctggaaataatcttaggcctaatacattctggaaggctcataaacatgtaaaaatgaacattcataagcatggaaaaaaaaataggtgaatgttaatatatttaatatattgcagtgaggaagacccttctaaggatgattgaaaagtaagaaagcataaagtaaaaattgtcgggttaaaattagtcatttttatactgcaaaatatctaaagttagaaacaaattatggaatgggggaaatatctgtaacacaaaatgctaatatgaatacataatattgtgaattatgaaacaaaaagatacacagtctaataagaaatatgtgtgaaggactatcacgcagttcttaaaaaaacaaagagatggccagcaaacttttaaagcagtactcaaccttattagtactcaaaggcatgcaaatgcagagatactacttttgagagtttgacaaagattaaaagtttgacagtttctagtgttttagggacgtgaggacacatatactctcaaataatattttgatgtaacagttgggggccgggctcagtggctcatgcctgtaatcccagcagtttgggaggccaaggcgggtggatcacctgaggttatgagtttgacaccagcctggccaacatgtcaaaccacatctctaccaaaaacacaaaaattagccaggcatggtggcaggtgcttgtagtcccagctacttgggtacttgggaggcttagcagtattacttgaacctgggaggcagaggtttcagtgagctgagattttgccacttcactttatccggggagacagagcaagactctgtctcaaaaaaaaaaaaaaaggttgatacagtcttactatagggcagactggcaatatatataaagttaaaattgtatatatagtctttaacaattcaaattttatatttttgtcacaatgtaacttgttaacaaaagatgtaggtaacaggttttctcagcattttttaaataatgaaacgttagaaacacgttaaatctaaaaagctattaaaaaggatgatagtttgacaagatttccatattaaatttttacataagtgtgtatatatatatatatatatattttccctctttctaaaatttataatcgtggttaactccaggtgatgagatttcaaataatttttatctatactctttgggttttctgtatggatttatctttatgatctttttcattttaaatttcttgttttaaagtatgtttttattcatgagactataaggattatatatatgaagggtttttgttgttgttggttttgttgttgtttttggatttttttgtttgtttgttttgtttttgagatggagtttcactctgtcacccaggctggagtacagtggcacgatcttggctcactgcaacctccgcctcccaggttcaagcgattctccagcctcagcctcctgagtagctggcatcacaggcgcgcaccaccatgcccagctgattttcgtatttttagtagagatggagtttcaccatgttggccaggctggtctcgaactcctgaccttgtgatccgcccacctcggcctcccaaagtactgggattacaggcataagccgccgtgcccggcctggccttttttttgtttttttctgttgagatggagtctcgctctgtcacccagaggtggagtgcaatggcacggtctcggttcactgcaacctctgcctcctgggttcaagcaattctcttgcctcagcctcctgaatagttgagattactggcatgcgccaccacgcctgggggtttcaccatgttggcttggctggtctcaaactcctgacctcaggttttccacccaccttggagtcccaaagtgctgggattacaggtgtgagctactgtgcccggcctatctggaagctcttaaccctgtaaaatgggcatccttttaagtcagagcatatagatttacttctttttaaacgttctgagtttttttgttttgttttgtttttttgggttccttaattgactaaaccagtgctggtctaatagataagtgggttatttgattttttaaaatcttgtcaaaaatgttaatagtgattatacttgaacctgtatcaagtattttataagataaattcctgtggagtgctgtgtccaaactagtctctgaacacacttttactacattctagtctaaatagttttttgagatggagtcttgctctgtcgccaggctggagtgcagtggtgcaatttcggctcactgcaacctctgcctttcaagttcaagcaattctcctgcctcagcctcctgagtagctgggattacaggcgcctgccaccacgcccggctaatttttttgtatttttagtagagacggggtttcaccgtgttagccaggatggtctccatctcctgacctcgtaatctgccggcctcggcctcccaaagtgctgggattacatgcgtgagccactgtgcctggccatttatttttacagcgaactacatttgccactgtactccagctcgctgtagcctcaagctcctgaactcaagtgatcctcccaccttagcctcctgagtagctggctaatgcctgactatgcctggctaattaaaaaaaatttattttggtagagatgggggtctcatcatgttgcccaggttggtcttcaactcctggcttcaagcaatcctcccaccttggcctcccaaagtactgggattacaggtgtgagccagcagtcccggccaaacttgctaattttaatttgtgtctttttgctttactaaatagtaaccatgagtgttctgagcttttctgagttctgtgagtcctggcaaataattgaaagtgaaagtgatcttaagcacccctgaacacatttaccacgcatggcccacttgcattcatctggtattggagggaaacaaatttctagagtttcagttgctacttttcagttgttccatggtgctttccaggagttccagtcgatgatatggggtttcgcctgtcatcacatctgtcaggctttgcgccttcttcatcctgcacagacactgagatcatgcaggtcttgtatctgtttgtagttcgtcttcactagcttgtattttgggatttgagggggtaagtggtcacctagtcttactgtagatattatccaggggattttgcttttgttatctatctagttgctctatttctttgttttgtttgtgtttatttattaagagatggggtctaccaatgttgcctaggctcactgcaacctcgaattcccaggctcaagcaattctcccacctcagtctcctgagtagctttggaactactggtgggcaccacaacacctggctaaattttttttttttttttttttttttttgagacagagtcttgctctgttgtcctggctggagtgcagtgccaagatcttggctgactgcagcctccaccccccgagttcaagcaattctcctgcctcagcctcccatgtggctgggactaccagcgtgcgccaccacatccagctaatttttgtaattttagtagagacagggtttcaccatattggtcagcctggtctcgaactcccgacttcaggtgatccaccagcctaggcctcccaaagtgctgggattacaggtgtgagccaccacacccagccaaattttttttttaagtgaataaaaaatggctaggcataagccaccatgcccagccaaaaaatcaattcttgtgatcatatcatcacacaaactcttccctcctagcacataggtttggagtactaggttcccttacttacttgaacagaatgatttttttttttttttttttttttttttttgagacaaagttttgcttttgttgcccaggctggactgtaatcatgtgatctcagctcactgtaacctctacctcccggagggttcaagtgattctcctgcctcagcttcctgtgtagctgggattataggcatctaccaccatgcccagctaatttttgcatttttagttgagacggggtttcaccatgttggccaggctggtctcaaaactcctgatctcaggtgatccacctgccttggcttcccaaagtgctgggattacaggcgtgagccatcacgcccagctaatgagttcatttttttaaaaaaaatcttcacagttcaagaaaaaaagtcagtatttaaattagtttcaaggacagacacagtggctcacggctgtaatcccagcactttgggaggccaaggtgggaggatcacttgaggccaggagttcaagatcagcctggccaacatggcaaaaccccatctccactaaaagtataaaaattagccaggtgtggtggtgcacacctgtaatcccagctacttgggagactgaggcagggaaatccgtttaacccaggagacagaggttgcagtgagccaagattgcaccactgcactccagcctgggtaacaaagtgagattctgtctcaaaaaaaattagtttcagagttccaaatattaccactcctgtctcaaattaggtttaaggcactcctgtgaacaggcagattctataggtataaattaagatgtcatttccctagagaggctaagaaataaatacattcaacaaatatttgatgaattaaaggaatgagatgaagatatctggagaaaacgactcattcgatccaccattcattctgcacacattgtgtcaggcaagatgctcagtatcagacacagaatataggaaagtacaagtaaccagctgggtgtggtcactcatgcctataatcccagcactttggaaggccaaggctggggaggactgcttgaggccaggagtttgagaccagtctggacaacacagcaagaccctcattctctacaaaaaatatttttaaaaaagtttttaaaagaaagtacaagaaggtacacataccctttcacaagtcacagtgatatcttactaaaatgcctggagccacaagaagcctgttttcccttcaaatgaaaagtaggttaaaactggattcaccaaatctcacagaagaaaaaagtacacacactgaacttttttagttttttattttgattcctatggctggacaaggtatctacattctagaacatcttcttaatccctaaacaagtggaaatctactacttatatataaaaagacaagtagaaaaggtcatgattgtctaacagggaacatgaatccccaaataaattatcttacaaaaatatcatacttgcttttctacttttttactatactggtaaaaatgaaatgaaaaaaataattcacattaaaataaaatctgtagggtggcatagaagacaattatttttacatattaaagtccttcaaataaatattttacacacaaatttaagtaagtttttaaaaaaaataagtatttacgctatatttttttgctctgctaaaaagagaccacttattaaactgacattaaactggactgcagctcattctctgcaaagagtaaaatgcatgtcacaggcagattggatacacacgtgcatattacatacatatgaaatggctaacactgctgtgcatactactgccataactagttttaccctgtaaaaatactgtagcctatactgtatcaaattgcaatgaaagaacaaaaggtactacttgcctattttagacacttggtcaagcatttaaaaaaatacaaaaattggtccactgcagtggctcacacctgtaatcctagcactttggaaggctgaggtgggtggaacacctgaggtcaggagttcaagaccagcctggccaacatggtgaaaccctgtctctactaaaaatacaaaaattagccaggtgtggtggccgacgcctgtaatcccagctactcaggagcctgaggcaggaggatcgcttgaacgtgggaggcagaggttgcagtgaactgagatcacaccactgcactccagcctgagtgacaagagtgagactccgtctcaacaaaaaaagaaaaagttataatgttttggggacttaaagattactgaagaggggataaaagtcaacactgcttacaaatacctgaacatggagagcacagtcaacacattcatgtggacagcacatgaacggatgtattaatacattacacagcttcttctatctgacctattcctcttgttctaaagagttacatggacttggatcctttaagatgattttaaaaataatattacattaagttttcctggtctaataaccaactttgagaagtacagtggaagggtatagaacttcctatatcttctatacttttaatgccaatttgatttttattgtgatgtgatatttaacagtatgctaaaaataaaattgactgaattgtatgattttgtccacaacattgaagtctctttttgctaaaatattacaaaatgaatccagtaaacactttccaatggcctaagttagagatgaattcaactttttttttaaagcaattacaactacgctgggctgaggacagctacgttagaccctgaaaaccaaagccaagcacccaaacatctaaaacactaacactttccatccaggatagaaaaatgagcatccaaagtaaagagaaccacaagactgatcaagtaaccagtcaaaaaccacttctctattatttgaacttatagttactcgaagcttgaagtgtccaccttcattattactggtggttcctagagtcacggcttcaatgtcaaacgtgacagtggacccagaagtaactgcgggtaactgatttgtcatttcttttccattgacaaaaactgcacctaaaatgttaaggtaaagagtcatttacatgtgagcaataactaagagatctgaaatagtttctagattactggtaacacagctcatttcctaattcagattttaaaaaatctggaatgccaactggacatagattttagagttctgtccagggttgtactcttccagcagagactatgagtttcccatatcagtgtcatcaaaagaaacttgacagtgttacaaaattacctcctgtgaaatagcaagactatttcttatggaataaacaagaaagaatcttgttctaccgaattcttgactcaccaacacaattttttttttttttttggagacagagtttcactcttgttgcccaggctggagtgcagtggcatgatctggactcactgcaacctccacctcccaggtttaagcagttctcctgcctgagcctctcggattacaggtatgtaccaccacgcccagctaatttttgtatttgtagtggagacagggtttcaccatgttggccaggatggtctcgatctcttgaccttgtgatccacccaccttggcctcccaaagtgctaggattacaggcgtgagccaccgtgcccagccaacaccacaaaatattattaacatgtcttgctagtgaatttttttttttttttttttttttgagacggagtctcacactgttacctggcatgatctcggctcactgcaacctccgcctcccgggttcaagcgattttcctacctcagcctcccaagtagctaggattacaggcacccgccaccacacctggctaattttctgtatttttagtagagacagggtttcactatgttggccgggctggtcttgaactcctgacctcgtgatttgcccgccttggcctcccaaagtgctgggattagaggcgtgatccaccgcgcccggcctctggctagcgatttttaaagagcactagggatgtagactgaatgatttattatttgtagaatttagaacaatgcctggtacatggtagtcacataaattatgtcattaagaccaaaactttcagccagccacggtggctcacgcctgtaatcccagcactttgggaggccaccaaggtgggaggattgctggaaaccaggagtcaagactcacctgggcaacaacttatctttacaaaaaagtaaaaataaaaaaaattagccagtcacagtggcatgcacctgtagtcccggctactcaggaggctgaagtgggaggatggcttgggcccaagaatttcaggctgcagcgggctacgatcatgccactgtactccagcctgagtgatggagtgagacttcataataaaaaaaaaaaaaaagaaaaagaaaaatacctaaattttctcatctcctactataaatgtatggaactggaacagattcacatattactaaaataattaatatatttccaagagaatgacagttatttatctcttaccatttgtactaatgcacacagcttgatcccgctgcagagagtcatatccatcctgtttttctgcacacactcctatgctatctcttctgtctggctgtcccacagtttcaactctgtaaatgaagtagaaaggtcatttcatacttttaaaaatataacatgaatgatacttaacagccactagcttaaaaagagcaatctcaccacaattgtttttttctaaatagtacagcaaccatgattgagttcttgctatactccaggcactgttctaattattttatatctatctatcattcttacaacaatctatgaggtaggtgctttttcttttttgttgagacggagtctcgctctgtcacccaggctgaagtgcggtggtgcgaccttggctcactgcaacctccgcctcccgggttcaagcagttctctgcttcagcgtcccaagtagctaggattacaggtgcccgccaccatacccggctaagttttctatttttaatagagatggggtttcaccatcttggccaagctggtcttgaactcctgaccttgtgatccacccacctcggcctcccaaagtgctgggattacaggcgtgagccactgcgtccagccggtaggtgctatttttaacatacccattttataagtgaggaaaatgaggcacgaaaagaaaaaaagattaaaaatagctaaataacctgatcccgactacctggctgatgactggtggaaccaggactcaaacacaggcattctgactctagaatcaatcaatctatctatctatttttttgaaatggagtttcatccttgttgcccaggctggagtgcaatggcgcgatctcagctcactgcaacctctgcctccctggttcaagcgattctcctgcctcagcctcctgagtagctgggattacagggatgcaccaccatgcccggctagttttgtatttttagtagagacggggtttcaccatgttggtcaggctggtctcgaactcctgacctcaggtgatccgcctgcctcggcttcccaaagtgctgggattagaggcgtgagccaccacacctggcctaattttgtatttgtagtagagacacggtttcaccatgttgctcaggctggtcttggaactcctgacctcaggtgatccaccctccttggcctcccaaagtgctgggattacggagtgagccaccgtgcccggcctagaatctatattcttaaccatttgtagccatgatggcacacttctattttatattctagctctagacacatagaaggtttgtcatagttgacattataatttatgtaactattgctgccagcgcctaaatcttccatataagaatttgcaatgatttgattactatttgttaagtaaataaagcatttaaaaagaactattataatcctaaaaaatcccattatggttatgaagacactattcaagcatgaagaacttcctatgtggcaagtttaagcttttccttttgtgttttcatttcagatgtcagtactttgtgtgctcttgaaataggaaatgtacagatccctattgccagacacatcattctctccatccagaaagccaactttgcaaggacaaaaaaaaaaattagtgtgaaacaaaatgtggcttttccaaagacagatgtgattatttatagtcaatgtggcctcaaaatgtcattgattgtgaaatagcaaacatgcaggatcataatatttgggtaggtttctgaagttatttcatatctgagcagtctaaagaagtatggggaggaggggccgggcatagtggctcacacctgtaatcccagcactttgggaggccaaggagggtggatcacctgaggtcaggagttccaagaccaccctaggcaacatggtgaaaccccgtatctacaaaaaatacaaaaattagctgggtgtggtagtggctcctgtaatcctagctactcaggaggctgaggtgagagggtcacttgaacctgtgagatggcgattgcagtgagctgagatcatgccactgcacttcaacctgggcgacagagcgagaccttgtcttaaacaaaaagagggggagagctggggaggggaatgagaaagaaaataggccgggtgcagtggctcacgcctgtaatcccagcactttgggaggccgaggtgggcggatcacaaagtcaggagattgagaccatcctggctaacacggtgaaaccccgtctctactaaaaatacaataaattagccgggcgtggtagcaggcgcctgtagtcccagctactcaggaggctgaggtgagagggtcgcttgaacctgagaggtggaggttgcagtgagccgattgtgccattgcattccagcctgggcaacagaatgagactttgtctcaaaaaaaaaaaaagaaaagaaaagaaaagaaagaaggaaaccttaaaaaaaatcagaaaatcttagaagcaaggaaagagcaggaatgttcacataggaagtgagggagacctggaaggagggggttgctagcagacctgggcatctaatgagagtgggtctagagactgttaaaatccagccagtatcacaggtttctctggcttcagcagctccaagccttccagaagcttcagcagggactgactgggataaataacaaagtagtgccttcttttttttttttttttttttttttttgagacagcatctcactctgttgccccggctagagtacagtggcgtgatctcggctcactgcaacctccgcctcctgggttcaagcgattctcctgcctcagcctcctgagtagctgggattacaggcacacaccaccacgcccggctaatttttgtatttatagtagagatggggtttcaccatattggccaggctggtctcgaactcctgacctcgtgatctgcccacctcagcctcccaaagtgctgggattacaggcgtgagccaccgtgcccggctaacgtagtgccttcaagagtatagtctcccttctaactactaggcccttaagtaccctcaaaaaactaaatattgtttctcttgattcaagtaggcgcacttgctcctcccttatgcccttatgcatggagtcccccttgcattcacatctctggcttcactgctgatgcctgaaattcctttaaacaaggggagaaaacatttcattccacaaagaaaaaaatgacaaaaatgcaaaaggctggctaccattatattgagtttaactgaatttcagttaatcaccctgccaagtggggcctggtgatgcatctttaggagatgcaagagagactcaacagtttattgagacctaatgtgtctttcacatcacggtcagcagaggtgaatttaaatcaatttgtataatttccaatgtcttaataaatatttactgaatggtctaagaaataaacctaactatgcaatctatcagacattaccatgtgtccaaggaggaagaatttaaaaagcaggagagcatcagatcaagtggtgaaaggtcataagaggtaaaagttaaagagctaaggacacagtaatagagaaactgtagacttcaacactaactagaatcatgttaactctcccatgaaaaagaagcaatacagaccagtctggagtcgaactgcctggatttaaaccctagttttggcatttactagctgtgtgacactgggtaaataacttctctatgcctcagtttcctcatccctaaaataaataacccatctatctcactgggttaccatgaaaatcaaatgagttaatacaagtaaaatacttaagacagtacatggcacatagtaaatactgtttaaatattaactgcaattattattattatcatcattattgcagtctgagatatctggcctgaatttatcaagttaggaagctctgtcattgcacagaaataccttgttctcaggagagtcactaaccgaagtgcttctgtaaacaagggacataagcagagaaggggtatgtaagtacagaaaactcatgattacctggggaatagttaaatagattttaggtattagttgtttttttttttcctctctctctctttgttggtatttttctgtttactgagtcattcttcattaaggggtgaggtgtcaaaaattagacaaaacaaactagtataatctgacaaccgctgacaattcaaattacttagctggagaggaatacagcaacactggcttagataaaatattcagatattctccatgccttaaataataagggcctgagaacaaaaggaacttgggtcaagcattcacaataaaatcccatctcaagacttaaaacttagaggagagcttgttacactaaggtgagtatggtgaaaatcaggcaaactttacttctctaagtcaaaactggtctttagtttctacgaagagctattcagaaacatgactataaagaatacatctcagataacatgaaaacaagaaaaaagaaacttttccattacagaaagaaatgggtagagaaacaacattaattagtggtaggggaggcttgctttcagttttactttagagagtagcatatacataatatgtttacagtgttgtctcttacaaagacttgctgttaatgattcacaaaggacaaaacaaattcttggccagtaaatttttttgctttttttttttttttttttttttttttccagacggaatcttgcactgtctcccaggctggagtgcagtggcacgatctctgctcactgcaacctccgcctccaggcttccagtgattctcctgcttcagcctcccgagtagctgggactacaggcgcacctcaccacacccagctaatttttagtatttttagtagagacgaggtttcactatgttggccaggatggtctcgatctcctgacctcgtgatctgcccacctcggcctcccaaagtgctgggataatatgcatgagccacagtgcccggcctatgctttttttcttttttttgagacggagtctcgctcagtcacccaggctggagtacagtggcgcgatctcagctcactgtaacctctgcctcccaggctcaagcaattctcatgcctcagcctcctgagtggctgggattataggtgtgtgccaccacaccctgctaattttttttttctttttgagacgggtcttgccctgttgccaggctgaagtgcaatggctcactgcaacatttgcctcccgggttcaagtgattctcctgcctcactctccctagttgctgggattacaggtgtgcactaccacatccagctaatttttgtatttttagtaaagatggggtttcaccatgttggccagggtggtgtcttgatctcctaaccttgtgatccacccacctcagcctcccgaagtgctgggattacaggcgggagccattgcgcctgtcctaatatttgtatttttagtaaagatggggttttaccaggttgaccaggctggtctcgaactcctgaccacaagtgatccaaccgcctcggcctcccaaagtgctgggattacaagtgtgagccactgcgtccagtctcttggcctctaaaattttttttttttttgaaacggagtcttgctgtgtcgcccaggctggagtgcagtggcgtgatctcggctcactgcaagctccgcctcccgggttcacgccattctcctgcctcagcctcccgagtagctgggaccacagacacccaccaccatgtccggctaatttttttatttatagtagagatggggtttcaccatgttagccaggatgttctcaatctcctgacctcgtgatccgcccgcctcagcctcccaaagtgctgggattacaagtgtgagccaccgtgcctggccaggcctctaaatttttaagatttactttttaattttgtgtgtgtgtttgagacacagtttcgctcttgttgcccaggctggagtgcaatggcatgatctcagctcactgcaacctctgcctcttgggttcaagcaattctcctgcctcagcctcccaagtagctgggattgcaggcatatgtgccaccatgcccggctgattttgtatttttagtagagatggggtttctccatgttgctcaggttggtctcgaactcccgacctcaggtgatccacctgcctcggcctaccaaagtgctggggttacaggtgtgaaccactatgcccagcctaagattgacttttgagagatactctacttacctctacttaccaagaggaaaagagatataaacatattaaataacaagcattttatatacatttcccagttaatctacgtaataaccctgtgaatacagatgagaaaactacagctacaggaaataaagaagccttcccacagtaacactgcctataaatgacggaataaactcaggatgttttgaattcaaagcttatgtatgctctatgcacttcactctgcttcctgaggcaggtgagatgttttaatatctacttgcctgaatgttaatgtctgcccacagaaataagtcggagctctggagtagagaacacccgatgattcagaatcgttccgaagtgctatatttcttcgactgctcagactgtacccctcaaaaccagctgtccactctttttcaaagcaaagatattgaaaactgttagaatctcttgagggatatcttcaatacagacacgttaaataaaacatggaaatgggagactactcttaggggccatggtcaagttcaataaaataaaagattccattaacagggtatcatgatcagtcccacaaattacaaaagattttagtatattcctgcataattttgacataataaatcacacaagtgttatctcttatctaataaaatcattgtacaagcataattgcttgaacttattccaacctgataaaaatctaattaataggccaggcgcggtggctcacgcctgtaatcccagcactttgggaggccgaggcaagaggattgcttgagcccaggaatttgagaccagcctgggcaacatagcaagacccagtctctagaaaaaaataaaaaattagccaggtgtggtgtgcatgcaggtggtcccagctacttgggagactgaggcagaaggatctagaggtcaggctgcatgattgcaccaccacacaccagcctgggcgacagagtgagaccttgtctcaaaaaaactaactaaataacattcaaatataaaaaaaagaataaaaaggaatatcagtgccctacataatattttcaatctttggttttcaatgaggctaaaaatcttgtccagcattttttttggactctgaagaactgatgaaaacaaaaatcacatgaggtaatctgagtaaaagacatggtgcatgttgttcttatcaattcaggatctatgcttagaatagctggttgtcagtgtgctgcccttagcacagaatacaggtattctaatatatagttaggcttcaggagagaaaaggttagcagcataccatgaggcaccaatgtggaatgacctatctgggggacactccaaggactccactcctgtcggccatctcctcgggcgcagactctgaactggtaatcaacgttggggtctatgtgcaatactatgaattcagtttcagaacctacatatacatcctcaaaatgatttgaagtacatttacgaaactggagcctgtaatcttgggctgtaaagtcatcatccacctagggagaaaagctttatgttaggtaaaaaacagaaaatgacttctctcagcatcactgcttaaaaattttgaacggagccattttggaccaagcagacaggcccacatgctgaatatggggtattcttgggaaggccatagaaaatatgccatcacatcattatctcccttcttttttttttgagaaagggtctcactttgtcacccaggctgtagtgcagtggcgtgatctcggcttattgcagcctccacaccccgggttcaagccatcctcttccttccaccccacaagtagctgggatttcaggtgcacaccaccatgtccggctaattttttgtattttttgtagagactgggcttcaccatatctcagatctttaactcctgagctcaagcaatcttctcgtctcagcctctcaaagtgctaggactataggcgtgagacactgcgcctgggctcccttcttttctttattgaaccatgtgttctgtatttcccagtctgatataaaaaagtctgcctcctttgaagaaatggcatgttttttaatcaatgccaaagataaaacattcaagattcagtaagtctcccacaaccatacatcattcataataaccaagagataattaacatacagtatacagaacccccattaatttttaggggtcctgcatatattctgtatgttaattagccacccaatagaaaaatgggtaaaagacataaataagcgttctacaggagaagaaacataaatagccaaaaatgtatattatgaatattcaacctaatttgtacctaatttgtaatatggcaaatacgatctaaaaccacaacaaggccagacatgatggctcatgcctataatcctaacactttgagaggccgaagcgggtggagcacttgagcccaggaatttgaggccagcctaggcaacacagcaaaaccccatctctacaaaaaattacaaaacttagctggctgtggaagcacatgcctgaagtcccaattacttgggggctgaggcgggaggatcacttgagcccaggagattgagactggagacatgattgtgccactgtactccagcctgggtgacagagtgagaccctgtctcaaaaacaaacaaataaataaaaccacaacaaggtacatttaggcaaaaatataaagtctcacaatgccaattattggtcaagatatggaataacagaaactcatatactccttggaaggctaaattgatagaatcatcttgtggaaagtttgttattacctatcagcgtatggatccaatactctaagaagacctcataattttacacctaggtaaatattaatattttacaaacttcacatatgtccataaagaaacacaagtaaaaatacttatagcaaaaaactggaaataactaggtccactgataggaaaaataataaaaatggaatgacagtcctgttagaaaataacaacagcatgtttataaaaaaagaaaaaaaaatttccttttaataaaatctcagctgggcacagtggctcacacctgtaatcccagcactttgggaggccgaggtgggcagatcacctgaggtcgggagtttgagaccaacctgaccaacatggagaaactctgtctctactaaaaatacaaaaatactaaaaatacaaacttagccaggtgtggtggcgcatgccttaatcccagctacttgggaggctgaggcaggaggattgcttgaacccgggagacggaggttgtggtgagccaagatcgtgccattgtattccagcctgaacaacaacaacgaaactctgtctcaaaaaaaaaaaaaaagaaaatgtcagccaggcggagtggctcacacctgtaatcccagcactttgggaggccaaggtgggcagatcacctgaggtcggaggttgcatcgctgcactccagcctgggcgacacagcaaggcttcatttaaaaaaaaaaggccaggcacggcggctcacacctataatcccagcactttgggtggccgaggcgagtgggtcacctgaggtcaggagttcaagaacagcctggccaacatggtgaaacctcgtctctacaaaaaatacaaaaattaggcaggtgtgatggcaggtgcctataatcccagctactcaggaggccgaagcaggagaatggcttgaacccgggggaagcggcaggcgggggagggcatggaggttgcagtaagccgagatcacgccacttcactccagcctcggtgaaagagcaaaactctgtctcaaaaaataaataaataaaataaaaataaaactggaagagctacctcagtgttccatgtgacttcattttaactgtaaagtaaaagagatttttgtttgagaagaaaagaatgtatttaaaagtagtcaacgaaaaaatctgaaaggcctccaaatcgcaaacccataatgtggaagtcatttctagaattctgaattacataccttacaccatcgtacaatgatgcctccaggtttctctattagttcttctatctgtactggtgggcgagatgctactgttccatgcttaaaaatgtggtctttcactatgttaagaattgagtcatccaactgagcagataaacaaggcacatcaaccagtaaaggtacttctggtaagctgaggaaacaaagctcatgtgttatgagacctctaactgagagttaaaaaatacaagaaatattttagagcagtcacatgcttgaaagatcctgaagcccccagtaattaattctcatggcagtaggggatttgcaagatgttacacaaagattctcttttcaaataaatataagtaagacagaaaattggtaggatcataactgtccagtttaagccaaaagatctggtttactggaatatgactccatttcaacaatacattgataatttctaaaatttaacaattcttttatatattggattgaaaaaatgtgtagtaatactataccaaggattataatcacaactatttcattagtaacagtggtaatgggcagtgaaacgcttttttttttttttttcagacagagtctcactctgtcccctaggctggagtgctgtggtgcgatctcagctcactgcaacctccacctccccgattcaagcgactctcttgcctcagcctctcgagtagctgggacttacaggcgcacgccaccatgcccggataattttttattttattttatacttattttgagatggagtcttgctgttgcccaggctggagtgtagtggtacaaacttggctcactgcaacatctgcctcctgggttcaagcaattctcctgtctcagcctccccaagtagctggattacaggtccatgcccgtctaatttttatatttttagtagagacagggtttcaacatgttggccaggctggtctcaaactcctggcctcaagcaatccacccgccttggcctcccaacgtgctgggattacaggtgtaaaccaccacgcatggtctgaaaaccttgaaatatatattctctatctcccttaatgagaatcttgaacagagggaggaaaaaagcagacatagtttaaatgcttaaaagtaagtcaaaaaggcacaaactcttttacctgtccaactgaatgtgcgaggcctttttggtaaagctccacagtttctcattctcttctcccacaccaccaagcatggcgatttcacctacaatcaagaataagagaactagaacaatgaaaatggtcacatataaagtaatcaacacaactcatgtctgggtgggtctctagcgttcttgcaaataagttcttaagtgatgccacagtcaaattcccaaaaagttaaagtagaaactattttagacgtgactctaagatcaaatccaagaggaaaagggatatacagtggcaacattttgccagagatgaaaaatctatctactctatacaaggaaatcaaccaattttaggcaaagcagaaagcccagggacttctttccatctctcctacagaatcattatgaacttcaataggagccagtacaaaatattgccctgagaggtgcaacaggggatagggtgtttttttttttttttttgagactgggtcttgttctgtcactcatgctggagcacagtggtaggatcataactcactgcagccttgaacttccaggttcaagcaatcctcccatctcagcctcccaagtagctgtgaccacacgtgcacgccaccatgcccagctatttttttttttttttttttggtagagatgaggtctcactatgttgcccaggctgggcataaggcttgaaaagccaaatgatgcatctatgttttcctaaaagagtatcatatatcagattacaaattattcaacagaacaataaaaagaaaatgtcaggctgggtgcggtagctcacgcctgtaatcccagcactttgggaggcggaggcaggtggatcacgaggtcaggagatcaagaccatcctggccaacatggtgaaaccctgtctctactaaaaatacaaaaattagttgggtgtggtggcaggtgcctgtattcccagctactagggaggctgaggcaggagaatcacttgaatccgggacatggaggttgcagtgagccgagatcacgccactgcactccagcctgggcaaaagagcgagactccgtcccccccgccaaaaaaaaaagttacatagaggcatatgatatgaaaatgaccaacttctatgtccttccacagccctgaagaacactgccagaactcttttccatctaaatgtgccctgtagttactcaagttttttgagaccatatgaccttctccttcaccaaaagaaaaacagagacatggccgggtactgtggctcatgcctataatctcagcactttggcaggctgaggctggtgggtcacctggggttgggagttcaagactagcttggccaacatgatgaaaccccgtctctactaaaaatacaaaaagtagctgggcatagtggcacgctcctgtagttctagctactagggaggctgaggcactagaatcgcttgaacccgagaggtggaggttgcagtgagccaagatcgtgccactgcactccagcctgggcaacagtgtgagactctgtctcaaaaataagtaaataaataaataaaatcctcaaaattccataagtaagtttctatccctcaggagaataggaaagagtttgacattaaaaatattcctaaagtttccttctgctgctgagatgtataataattttttttaattaaaaaacataggccaggcacagtggctcacgcctgtaatcccagcactttgggaggccgaggtgggcaaatcacgaggtcaggagtgctagaccagcctggccaacatggtgaaactctgtctctattaaaaatacaaaaaatttgctgggcgtggtggcgggcgcctataatcccagctactcgggaggctgaggcaggaaaatcgcttgaacctgcgaggcgtaggctgcagcaagctgagatcgtgccactgcactccagcccaggcaacagtgcaacacgccatctcaaaaataaataagttaattaattaaattaaattttggacatacaaaaatattcaagtatcaaatgctgtaacactcacactgcctcaaagggattttttctttttgagacagagtctcactctgtcacccaggctggagtgtgatgtataatcacagctcactgcaacctcaaactctggggctcaggggatcctcccgcctcagcctcccaagtagctaggactacaggaatgtgccactatgcccagccaggatttatctttttttttttttgagatggagtcttgctcttgtcgcccagactggagtgcaatggtgcaatctcagctcactgcaacctcttgcctcagcctcccgagtagctaggattacaggtgcccaccaccatgcccagctaatttttgtatttttagtagagacggggtttcaccatgttggccaggctggtcttgaactcctgacctcagatgatccgcccccctcggcctcccaaagtgttgtgattacaggcacgagccaccgcgcccggccaggatttatcttctaaaataaaaacaaatgatcagtcctcagggtgatgagtgtacactcctggcccgtggtgcactgcttctgggtttgtttccaaatgcaaagccaccaaggaaagacatttcatggtactgctagaattttctcaaaagtactgttatggtcagtggcaaataaacacttctcattgaagacaagacaaaaatgtaaccagcaatgtcaagataacacccatactatattctaagtgggaccaaaagaagattaacttccaggtggagtgacagccatgtgaatcatccacgcctttttcccacaccactcccagcactcattctgcagaagagatggaattcagtctccttccctagctcctttttcctcaaatgacttttaaatgttggtgacccttagcgttctaatctctttcatctgctcttctcacattacacggtgtcccttgatgattgtacttattccaatagattcagatttgatatatatgccattaactgccatactgacatctcctggtatgatctctctcctaagaatcatacccgtatttccatcttaagcacctcaaactcaccatgcccaagccaaatgcctaactacgtactaagcacccgccttctccttcaattcctttgtcaaaaacagcaccactatttattcagaatccaaaagtaggctgatttttgttatcacaaatcctttcctttcccctccatcacatatgtaggtaatcatctacagataacagtcactgctcagtaaaatcatcaataattctacttcttaaaaaaaaaaaaaactctgtcttgtttttttgtttttatttttaagagacagggtcttgctctgttgcccaggctggagtgcagtgctgcaatcatagctcaagctctcccacctcagcctcctgagtagttgggacaacttgtgtgtgccaccatgcctggctaatttttttttttttttttttgagacggagtctcgctctgtcgcccaggctggagtgccatagcacgatctaggctcactgcaagctccgcctcctgggttcacgccattatcgtgcctcagcctcccgagtagctgggactacaggcgcctgccaccatgcctggctaactttttgtattttaagtagagatggggtttcactgtgttagccaggatggtcttgatctcttgaccttgtgatatgcctgcctcggcctcccaaagtgctgggattacaggtgtgagccactgtgctcagcacgcctagctatttttttttaaaaaaattagagacaatctcactacattgcccagactggtctcgaactccttacctcaaatgatcctcctctcctgtctaggctcccaaagtgctgggattacaggtgtgagccattgtgcctggctcaaaatctcttaaaatcagccctgcctcatctttaccagccaccgcctttaccattcctacctggattactttctaataactttttttttgagatggggtctcattatcttgcccaggctggtcttgaactcctgggctcaagtgatccacccgcctcagcctcccaaagtgctgggattacaagcatgaaccaccgtgcccagtttctaataatttttttttattttgagacggagtctcactctgttgcccaggctggagtgtagtgttgtgatcttggctgactgcaacctttgtctcccaggttcaagtgattctcctgcctcagcctcccgagtaactggaattacaggtgcccaccaccacgtctggctaaattttgtatttttagtagagatggggttttaccatgttggccaggttagtctcaaactcctgacctcaagtgatcctcccatcttgacatcccaaagtgctggggttataggtgttagcctggcctcggcctctaataactttttaatcagtctcttttccctctagtcttacaatctctaacatagtctccaaataggcagggtcattttttttttaaatgcacatctgatcctgtcactctgctgcttaaaatgcttcaactaatccttgaatatgccattcactccacttatgataatgttacttctgcttggaatcatgctgttacctcctctttttcctatgtctgctggatgaattgcttcaagcctctgtggaactcttcctacagaaagctatcccacactattccagacaaagttaagaacttcctcctctatgctccaataaggtcttgatctcttagcatgtatctctctctcactgggctctgaatcccaaaggaaagaactctcacctattttattcttttcttttttttgagagggagtctcactctgtcacccaggctggagtgcagtggtgcaatctcggctaactgcaacctccgcctcccgggttcaagcaattctcctgcctcagcctcccgagtagctaggactacaggcatgcgctgccacgcccggctatttttgtatttttagtagggacggggtttcaccatgttggccaggatggtcttgatctcctgacctgatgatccgcccacctccacctcccaaagtgctgggattacaggcgtgagccaccgtgcccggcctttattcttagtcttattttatattttttgagacagggtcttactctgtcacccaggctggagtgcagtggtgcaatcacggctcactgcagtgtcaatctcctggcctcaagggatcctcccgcctcggcctcttaagtagttgggactccaggtgcatgccaccatgcccagctaagtttttttttttttgtagcgacaggctgttgcccaggctggtcttaaactcctgacctcaagtgatccacttgcttcagcctcccaaagtgctgggattacaggcgtgagccaccacacctggcccccttgtttatgttatgtgcctgacaaagatctctgttgaaggaaggtggtataatgaagaaaggaaggcagcagggcatgactcaatggaaataattggcaaagataggagtaaacaccaatcacatttttttaaactttctaaataaaacaatggagactgtaattgtggtggcttttgcctgtaatcccagcactttgggaggccaagatgagaagattgcttgagaccaggaattcgagaccagcctgggcaacatggtgaaaccctgtctctactaaaaatactaaaaaattacaggcatggtgggacgcgcctgtaatcccagctatttgggaggctgaggtgggaggatcacctgagccagggaggtcaagactgcagtgagctctgacagcaccactgcactccagcctgggcaacagagcaaaacccctgtgtcaaaaaaaaaatatatatatatatataatttgattgactgtaacacagaagataaatgcttgagagaatggataccccattttccacaatgtgattattacacaccgcatgcctgtatcaaaacatctcaatgtgccccatatcatttattctttcttgttttataactaattataactaacacttcaactgcacttgccatgcgatacctaacggtatatctgtcatcctatattacaaactgtctctaggtaagaacattctaagaaccccacagctggcaagaagcctgctgctatcctgagaaatcagcaaaatgtcaatctgaacgaaccacatttaacctgtgatataatttggctctgtgtccccacccaaatctcatctcgaattgtactcccataattcccatgtgttgcaggagggacccggtgggagataattgaatcatgggggcagtttctcccacactgttcttggtagtgaataactctcatgagatctaatggtattttaaggggaaacccctttcgcttggctctcattctcttctcttgtctgccgccatgtgagatgtgcctttcacctgccatgattgtgaggcctccccagccacatggaactgtaagttcattaaacctctttcttttgtaaattgcccagtttcaggtatgtctttatcagcagtgtgaaaatggacgaatgcactaatacaacaggctccctggtcccccaccttctcggactaagtcctctgcagtgttgactccgtgttctatgagcttctggcagtcatctagtggtttaatggtctcctgttcaatggtgtccacctcttgcaaaagggtcaccaatcgctcatccaggagctttccaagggttccctttaaatcattaaaatgctgtttgagaacatcccttgtctgtgatgcactttctttgatctaaaaagaaataacaaaatactcaaaatcagaatctttaaaaaaggctaatccaaaggtataattcacatgaatctaaaagcactgtataaccatcttcttcaatttagtaaaaaaaagattaactgaaattatatttaaggtgtgatattttgatacacatatacatagtgaactgttaactatagttaagctaattaacatgtccatctcttcacatggttacctctgtgtgtggtgagaacacttatgatctctcctaacacattccaagtatacattacactattattaactattgtccctatcctgtacttgagctctctagaatttacacatattaaataactgaaactctgtaccctttgaccaacatctccccatccccaactccatccctggcaagcaccattctactttctgcttctatgacttcgacctttttagattctacatatgagatcgtgcagtatgtttatttctgtatctggcttatttcacttagcatagtgtccttcaggttcatccatgctgtcacaaatgacagaatttccttctcttttaaggttgaatggcattccattgtatatatacatcttccattcattgataaaccaaatgtgattcatttgcacaaacagacagaagtacacagaactgcccttcaagtcagatagaataagccaaatcttggtttcatcattcacaaactatgtcaatttggttaagttaattaagtattctatgcctcaattttcttatttgtcaaatgagcataataatagttatttcagccgggcgcagtgcctcatgcctgtaatcccagcactttgggaggccgaggagggcagatcatttgaagtcaggagttcaagaccagcctggccaacgtagtgaaaccctgtatctactaaaaatacaaaaattagctggacgtggtagtgcgggcctgtaatcccagctacttgcgaggctgaggcaggagaattgcttgaacctgggagatggaggttgcagggatccaagattgcgccactgcactccagctgggcaacagagtgagacgccatttcaaaaaagagaaataaataatagttacttcatggagttgctgtgaggataaattaaaataatctaggtactacagtgggtaaaataaatggcacattgttatactcgctaaaaaaagttataaattattatctatacaaagttgttcttgaaaagtgtacgtttcaatactgaaaattgtttaattatgaggggattaaaattcattttactgaaaagcagcaaagaagtggtagattaaaaagctatggtcagctgggcatggaggctcatgcctataatcccagcacttgggaggccgaggtgggtggatcatgaggtcaggagttcaagatcagcctgaccaacatggtgaaactccatctctactaaaaacacaaaaaaattagctgagtttggtggtgcatgcctgtaatcccagctacttaggatgctgaggcaggagaatcggttgaacccgggaggcgaaggttccagtgaactgagatcgcgccattgcactccagcctgggcaacagagtgagactccgtctcaaaaaaaaaaaaaaaaaagcaagccatggtcaggtgcagtggctcacacctatgatccttgcactttgagaggctgaggcaggaggatcacttgagcccaagagtttgaaaccagcttggataacatggagaaatcctgtctttacaaataatacaaaaattagccgggcatggtggcacatgcctgtagtcccagctacttaggaggctgaggtgggaggatcacctgagcccagggggtcgagactgcagtaagctgtgactgcaccactgcactctagcttgggtgacagagtgagaccctgtctctaaataaaaatgaaaagccacaatacaaacaaacaaacaaacaaaaaaactcatggataaaatgccctcattatgctaaaagaaaaccaaaaattatttaaaaaccaaagaggcctgtaggaggcagagctgggacaatgacttaatcctttttgaattatagtgctctttgtcaatctaaatgagaggtttataaagcctcttcctttcaaagttattgaaagagaagaaaaagcctcttccccaaaaaatacataatctataccctaaaaaattattcaattgcagaagtttacaaattccctcagagccaaaccatggcttgcctggagcagtaattatgaaacttcgtttgcagaagaatcatgtaggctacttgttataattcagactgcagagttccatcccagacctactgaaccagaaaatgacaggaggggctaaaggagtgtatggatggagttctcattttttccaagcacacctgtgattctgtagcccacaatttgagaaacattgccctaaatctactgatctcagattaagaacccatattctaggggatatgacaggaaaatcttcatgtcaaatatattatgaagataaataggttgtttatacagacaccagatttttcttcttttatttcagagacagggtctcactctgttgcacatcctagctcactgcagccttgaactcctgggctcaggtgatcctcctgcctcagtctcctgagtagctgagcttataggtgcgggccaccacacttggctaattttatttttcactttttgtagagacgagatcttgctatgttgcccaagctggtcttgaaccagcttcaagcaatcctcccaccttggcctcccaaaatgctgagattacaggagtgatccactgcacctggtccagatttttattttaaagacttcagataacaggccaggcatggtggctcatgcctgtaatcccagcactttgggaggccaaggtgggaggatcaccactgcaacctgacctgggcgacagagcaaggccctcttctcaaaaaacaattcaggtaacatataattcattttctctcgcttaatgggaaaattctaactataagccactccgataagttaaagcaaaaacatactttgctttctagatattattatcttagtttcatatgacatattgtttaccaccataacccttttgttaactttctcttatcaagaaagtttaaagtataagaaaaatccaccaagaaagaacatatcaaaatatgaataaaggacaatatttcaacagttaatatagagatttaaaaactttctatttattctctaaattctctctaaatttaaaaagcagaatacaatattgtttcccagcaatgttcacgaccatgtaaaaacaaaaaatgcccatgcccaaggactaaaacagaaaaagagcagtatcatttactgggtgggcagaccatagaaacaattttctttccttttttttttttttttttttttttttttttttgacacagagtttcactcttgtggcccagactggagtgcagtggcgcaatctcggctcactgcaacctctgccttctgggttcaagagattctcctgccttagtctcctgagtagctgagattacaggcgcatgccaccacgcctggctaatttttgtatttttagtagagacaaagtttcgccaagctggtcttgaactcctgatctccggtgatccacccaccttagcctcccaaagtgctgggataaggcgtgagccacctcatccagcccttttctctccatttgacattaacgcagttataataatatttatgcagttagtaaaataattctttaaatcacaaagagaaatcctaaattaattgttaactaatttctgtatttaccaaagaatttctgtgaaataaatccaagtaaaaattttaaaaagaaagaaaggccataaacccaaattgcacttgattcagctcaccattcaactatgagatctttgcaaactgggccctcatctacatagcatctggtaaacaaatgctgttgagtgaaaacgcagttaatcatgtgtgtttcaaagaactttctaaaagaaccaaagagagaataccttatgattttaacacaacccctgggatactgttagaaattcagaatctcaggccccacccagaactgctaaatcagaacatgaattttttttctttcctcctcctcccctagaacctatattttttttttttttttttttttttttggagatggagttttgctcttgttacccaggctgcagtgcaatggagcaatcttggctcactgcaacctccacctcccgggttcaagtgattctcctgtctcagcctcctgagtagctgggattacaggcgcatgccaccatgcctggctaatttttgtatttttagtagagatggggtttcatcatattggtcaggctggtctcgaactcctgacctcaggtgatccttctgcctcagcctcccaaagtgctggaattacaggcgtgagccaacgcgcccagccaaacctgtatatatatatattttttttttgagtcttgctctgtcgcccaggctggagtgcagtggcgccaactcggctcactgcaacctccgcctcccaggttcaagcagttctcctgcctcagcccccctagtagctgggattacaggcatgcgccaccaagcccagctaatttttttgtatttttagtagagacggggtttcaccattttggccaggctggtcgcgaactcctgaccttgtgatctgcccgcctcagcctcccaaggtgctgggattacaggcatgagccaccgcacccggccaaatctgtatttttaacaggaccctcagttgctttgtatacatattacagataccagaataagtgaagaccttgtgtcagaacgctgtaatacatttcgaatggccaagaggaaattctgcagttgagcactgtgcctctgaggtcctgtcttgctctttagcggatatagcatacacaggaagtgcattggttaggtaaagtcaatttcctcttcagaaagaattcaaaagctccttcagctgttgcagagcctacgttttgtttttgtttcagaacctcagaaaaaaggaagtaagtgaacacaaaacagacagagggctaaaaaaatgagactcaatttccaaattcacctcctgtactctcattgtaaatttggtcccttttgctcatagaatcccaaccactgccatttgaaacttgataccaccatgggatcattttcttttccttgaaatatttcatgatttaaagcctagtcacctttaatccaatcatgtaactaatcaagttcatttgcttgactttatgaaactaatttaaaaatgcagctccactgctgagtgaatttcttcatatttgatgtggtaccaatggttccatgcgttcactgttaactcaataaatcttcacaatgcactttcagaaagtgaggaccaaagaagagaaagaagacaacttacccaaggcttcgcagtgccagaaacagtctaactccaaagactatgctctttcattacaccatgctgttttgtacttacaggacactttttttttgagacaggttctcacttggtcgtccaggctggagagcagtggtacaatcacaactcactgcggcctcgaactcctgggctcaggtgattctcccaccttagcctcccaggtagctgggaccacaggcatgtgtcactacacccagctatattttgtattttttgtcgagacggattttcatcatgtggcccaggctggtctcgaactcctggactcaagcaatcctcctgcctcggcctctcaaagtgctgagattacaagtgtgagccaccgcgctcggccatagaacactattttaaaagagctcccagataaatctgtaaattatgtattggctaaagacacttcttggtataacacgtagtatttcctgtccctgtgtaaagaattgtgtggtggacaaccaatcagcttcaaatgctacctagtcattcaaggcaaaaacaactgtggtgatttgtaacaaaatagatttaagaatacaaatgacagacaagatttcaaacaggaaactgtaatatacattgtttatgttgatcaataatattttgaaataatctgccactaaaacctttaatgtaacagaccattaaaacttacaaagttttggcctgagcacattggctcatgcctgtaatcccagcactttgggaggcccaggcaggtggatcacaagatcaggtggtcaggagttcgagaccagcctggccaacatggtgaaaccccgtctctactaaaaatgcaaaaattacccaagcgtagtggtgcacgcctgtagtcccagctactgggctgaggcaggagaatcacttgaacccgggaagcggaggttgcagtgagctaagatagtgccatcgcactccagcctgggcaatagagcaagactccacctcaaaaaaaaataataaataaataataaaaaacaaaacttacaaagtttccactacagctgaatataaccccaaagcaactgttttaaaattttaacatgattaagagctcacaaaatgccaaaaattcatcaagtttgtatttcaatactaagccacccaaaagcttagggagtatttccttcacaaccctccaaaacaacagtgactgatatattttcctccagagtttagttactaaaaagacatatgtagaggccaggtgcggtggctcatgcctataatcccggcacttttgaaggacggatcacttgtgtccaggagttcaagaccagcctgggcaacatggcaaaactctgtctctagtaaaaaatacaaaaaatcagctgtgtgtggtggcatggcttgtagtcccagctgcttgggaggctaaagtgacaggaacacttgagcctgagaggttgaggcttcagtgggtggtttttgcaccactgccctccagcctgggtgacaaagtgagaccctgcctcaaaaataaccaaacaaacaaaaaagaaaaccacatatataaaacacaaaactatttgctaacaagaacatactgattaaaaactggccaggtacagtggcttacgcctgtaatcctaggattttgggaggctgaggcaggtggattgcctgagctcaggagtttgagaccagcctgggcaacatggtgaaaccctgtcgctgctaaaaacacaaaaattagctgggtttggtggtgcctgcccgtaatcccagctactcggaggctgaggcaggagaatcatttgagctcaggaggtggaggttgcagtgagccgagatcacgccactgtactccagcccaggtgagagagcaatactctgtctcgaacaaacaaacaaacaaaaaacaccacaaaaaaaaacagaaaaacatatttatcaaaaataaaagacagccgggtacagcggctcatgcctgtaatcccagcactttgggaggctgaggcagttgaatcacggagtcaggagttcaagaccagcctggccaacatggtgaaaccccgtctctactaaaaatacaaaaaaattagctggtcatggtggcgggcacctgtaatcccagctactcaggaggctgaggcaggaaaattgcttgaacctgggaggtggaggttgcagtgagccgaggccgtgccactgcactccagcccaggggacagcacgagactctgtctcaaaaaaaaaaaaaaaaaaaaaaaaaggccaggtgcggtggctcacgcctgtaacccttgcactttgggaggccgaggcgggcgggtcatgaggtcaggagatcgagaccatcctggctaacatggtgaaaccccgtctctactaaaaatacaaaaaattagttgggcttggtggcgggcacttgtagtcccagctactcgggaggctgaggcaggagaatggcgtgagcgggggaggcggagcttgcagcaagctgagattgcgccagtgcactccagcctgggcgacagagcgagactccgtctaaaaaaaaaataaaaataaaaataaaaataaagacaaagataaaaaatagtcaactgaaattgaaaacgctaatcaacatattttttctcagtttctgtgaaatgtatattacattagctatttgtctttgtactgacaccaagacatcagtcattagtaataatggaaacagcaacaatacagcagcagctattatctactgagtacctgtatgccaggtaaatctgtacctatggtctcatttaaactctaccataaccctgtgaagagaacctgtgtagatgagtaacatgggagtcagagagatgaaactggccatatcacaaagttagtgaagtggcagagattttgaattcagtctgactcaagaatggacttgtaagcactgctatgtttctccttgtttctcttacacttaagacttttttagaaaaaaaagtgcttaattgagaactttcaaacagaaaacgtatattatatgatttggtaatctgttacagtagtggcccccaatgaaccaggaattcacatttccaactactcgtggccttgtgtggtcctctcccctagaatctgggctgggcctgtgactagcaatgcagtcacacgtgcacagcaatagagtgaaactgatcctgtgccagttccaggcctcatccttcagaagacctgtcaacatctgctttttggaggccaccatgaaagaagtatgtctatctttctggagaggacaaggggaaagagacaggaaggtgaaaaggcaggaagggaggaagacagggagagagactggcaccaaagcccaggtatgccagtgttccaactgagactagctaatactaagtctccaaatataaatgaatgttctctgtcagacattccagccacaactgcaaccacaagagtgttgccaagcaaaaccaggagaactacctatctgagccccagtcaacttccagaattgtaagcaaataaaatggttgctttttaagtcattaagctttggcacagttttattacgtagcagtaaacaaatcatataaaaaaatacacgcttaattcttgattatctatactaatagagtgcacatcatcaagaccaagacaatcgaaaaaagaatgtctgccaaattacacccacaacattcataaaggcattcattcaacatttattgaggcctagtatgtgtcagaaattagggttataaagatgaataaagcatggtcttcacctcaaaaactctcattctggtaagggggatggcaagcaaaagtaactataatgaaatgaattatgttcttacatatctggggcagccacaaactgccatcagagcataaaagagcattatgatgggaaagagagtaggagacatttaaagaataagttgtcagttggaggagcaggggatgtcaccttgaataacaataatatttagtattattatggctgacattaattaagaatctcctatgtcctaggcactgtgctaagcgttttttttttaataactataagttttagggtacatgtgcacaacgtgcaggtttgttacatatgtatacatctgccatgttggtatgctgcccctattaactcgtcatttaacattaggtatatctatctcctaatgctatccctcccccctccccacacccagtgctaagcattttaaataagtttctcattttaattcccacaatggccaggtaaagcagatactacccttatcctcattttacacagaaggaaactgaagattaggaaaatttagtttctcaagctttcacagctaatacgaacaactaaaatagctgcaaatattagtgactcactgatagccctcaataataaaaaaaggctgggttgggtgtggtggctctcacttgtaatcccagcactttgggaggctaaggcgggcagatcacttgaggccaggagttcaaaaccagcctggccaacacagtgaaacctcgtctctattaaaaatactaaaattagctggccttggtggcgcatgcctgtaatcccagatactcgggaggatgagacagaagaattgcttgaatccaggaggcagaggttgcagtgagccgagactgagacactgcactccagcctgggtgacagagcaagactccgtctcgaaaaaataataataatagtaataacaataaaaggctgtcttatatttgtttggctttttagatgacaaattagtcatattctttaccagatttatagcaataagaatagttatcggccaggagcagtgtctcatgcctgtaattccagcactttgtgaggccgaggcaggcggatcacctaaggtcaggagttgggagaccagcctggccagtatggcgaaaccctgtctctactaaaaatacaaaaaaattagccgagcgtggtggtgggagcctgtaatcccagctactcaggaggctgaggcaggagaatcgcttgaacccgggaggcagaggttacgctgagctgagatcgtgccactgcactccagcctgggtgacagagcaagactccacctcaaaaaaaaaaaaaatagttctctatcaaaattatatacattacaatctacactaaaacaaaattgccgggcatggtggctcatgcctgtaatcccagcactttgggagctcgaggcaggtggatcacctgaggtcgggagtttgagaccagcctgaccaacatggtgaaaccccatctctactaaaaatacaaaattagccgggtgtggtggcacatgcttgtaatgccagctactcggaaggctgaaggaggagaatcacttgaacccccgggaggcggaagttgccgtgagccaatattgcgccattgcactccagcctgggcaacaagtgcgaaactccgtctttaaaaaacaaaaaaatctacacacaaaaacatacctctataacattcacacacatttttttctttcttttttctttctttctttttttttttttttttttgagatgaagtcttgcactattgcccaagctggaatgcagtggcgcaatcttggctctgtgcaacctctgcctcccaggttcaagcaattctcctgcctcagcctcccgggtagctgggattacaagcacccaccaccaagcctggctaatttttgaatttttagtagagatggggtttcagcatgttggccaggctggtctcgaactcctgacctcaggtgatccacccgccttggcctcccaaagtgctgggattacaggtgtgagccattgcgcctggccaactttttgtatttttagtagagatggggtttcaccatgttggccaggctggtcttgaaaccctgacctcaggtaatccacccaacttgccatcccaaagtgctggtattacaggagtaaaccaccctgcccgaccagaaaatggctagtttcttcttttttttttttttttttttgagatgcagtcccactctgttgcccaggctgaagtgcagtggcgcaatctcggctcactgcaacctctaacccccaggttcaagtaattctcttgcctcagcctcctgagcagctggcattacaggcgcaccaccacacccacctaacttttttgtatttttagtagagacggggtttcaccatgttggccaggctggtctcgaactcctgacctcaggtgatccgcccgccttggcctccctaaatcctgggattacaggtgtgagccactgagcccggccagaatggcttgttttaattctccttgacctccttctatatttctggggagttttaaactcaaccagcagctttcagagtaccatatttaaagatgatttctgtacattggtgttgttcaggaaataaaaagttaaaaaaaaaaaaaagacaatttgtaggccgggcatggtggctcacacctgtaatcccaacactctgggaggccaaggcgggcagatcacgaggtcaggagttcgagaccagcctggcaaatatggtgaaactccgtctgtactaaaaatagaaaaactagccgggcatggtggcatgcacctgtagtcccagctactcgggaggctgaggtgggagaatcactcgaacccggaaagcagaggttgcagtgagccgagatcgcaccactgcactctagcgtgggtgacagagcaagactccatctcaaaaaaaaaaaaaaaagacaacttgtaaaaagatttattggtgaaaagactgactcaaaaaccaatgtaaatatgtggtcttttgcaaacaaatacagtcaagcatcacataatgatgttttggacaatgacaatcacatacataatggtagtcccataacattatattactatatttttatgtctttactgtatcttctttctttcttttttttttttttttttttagacagggtctagttctgttgtcgaggctggagtacagtggtgtgatcatggcttactgcaccctcagcctcctgggctcaataaatcctctcacctttgcctcccgagtagctgggaccacaggcatgcaccaccacacctggctaatttttaatttctttgtggagatgggggtctccctatattgcccagactggtctcaaacttctgggctcgagatcttcccgtcttggcctctcaaagtgctgggactacaagtgtgagccagcatgcctactgcaccttttctatgttagatgcacacttacagttatgttacaactatctacagtattcagtatagtaacatgctgtacagacttgtaccctaggagcaatagaatataccatatagcctaggtgtgtagcagatgataccatctaggtttgtacaatgacaaaatcgcccaatgacacatttctgagaatatatccctgttgttttgactgtatatgtgtggcttttatttttaccccccttatttgcaattagttttgcttccagtattttggggtaccagaatcaatacattgcaacctaccaccaacaaatgttcctttaaatatctacaatagactccacctctgtattaaaaatgaggctgtgggacaggcacagtggctcacgcttgtaatcctagcactttttgaggccgaggtgggtggacagcctgagctcaggagttcaagaccagcatgggcaatatggtgaaacctccttctactaaaaatacaaaaaatgagccgggtgtggtggcatgcgcctataatcccagctactcaggaggctgaggcaggagaattgcttgaacccgggaggtggaggttgcagtgaaccaaggtggtgccactgcactccagtctgggtgacaaagtgagaccgtcttcaaaaaaaaaagctttgcatgggaaaaatattcttgtaaatgcttatgatgttaccaaaattcttataatgctaacaaaatgcttataatgttaataaaaattaaaaattgatacaaagttgcatatacagtagtctctcaactttgcagaataatatgtatagaaagatacatcaaaatgttaactgcaggccaggcagggtggctcaagcctgtaatcccagcactttgggaggccgaggaaggtggatcatgaggtcaacagatggagaccatcctggccaacgtggtgaaaccccatctctactaaaaatacaaaaattagctgggtgtggtggcaggcgcctgtagtcccagctactcaggaggctgaggcaggagaatggcttgaacccaggaggcagaggttgcaatgagccgagatggcgccactgcactccagcatggcgacagagtgagactccatcccaaaaaaaaaaaaaaaaaaaaaaagttaactgcagttgtctgtaagtagtaggttattttaaaactatttcatctgggctgagtgtggtggctcatgcctgtaatcccagcactttgggaggccgagatgcgcggatcacctgaggtcaggagtttgagaccagccttcaccatggtgaaaccccgtctctactaaaaatacaaaaattagctgggcgtggtggcgggcacctgtaatcccaagtactcaggaggctgaggcaagagaattgcttgaacctgggaggtggaggttgcagtgagccaagattgagccattgcactccagcctgggcgacaagagcgaaacttcattaaaaaaaaaaaattatttcatctgttcttggttttccctgtatctggatttaaccttttcttagaatactataatagggacactttaaatactactactgtaacaaattatacacagatttttgtagtgttttcaaaatgggtaacagaaggggaagtgggagataaaaggagcaataatggctttcttttcttttccttttttttttttttttgagacagtttcactcctgttgcccaggctggagtgcagtggcatgatctcggctcaccgcaacctccgtctcctgggttcaagcaattctcttgcctcagcctcccgagtagctaagattacaggcgcccaccaccacacccggctaatttttgtatttttagtaaagataggttttcatcgtatgggtcaggcttgtctcaaactcctgacctcaggtgatccgcccgcctcagcctcccaaaatgctgggattacaggtgtgagccaccacgcctggccaacagctttcttttctttgctaagctactgagacttcctgtcttggttttttgaaataacttttgagtgtttttttttttttgagacagtcttcttctgttgctgaggctggagtgcagtggtgccatcttggctcactgcaacctccatctcccaggtataagcaattctcctgcctcagcctccagagtagctggaattacaggtgcattccaccacacctggctaattttttttacatttttagtagagacagagttttgccatgttgaaggctggtctcaaactcctgatctcatgtgatccacccgcctcggcctcccaaagtgctgggattacaggcgtgagccactgagcccagccaccaactagtatcttaattaggtaccaggatcttaccatttgctcttgaaggagcagagacttgcttttgtcagtgtcctgagaaatactgaatcagaataccaaaaggtacatgaaagccaacatagtcattttatagagtgaactacaacacacagactaaaatactggcatttctcactgtagacacctccagtacctcaactaattcccctttgataatgtaccaagatgaagtttttggacttacaaagattaaagaccaggccctgactttggcattgtcatcaaggtggtgccactctgtgaggcctgagtggccagctgacatcactacgtgacattttgatcagttatctctacttacgtttttgtttttgagatggagtctcgctctgtcgcccaggctggagtgcagtggtgtgatcttggctcactgcaacctccgcctgcccggctcaagcaattctcctggctcagcctcctgagtagctgggactacaggtgcacgctaccacacctggctaatttgtatttttttagtagagacggggtttcaccatattggccaggctggatctctacttataacaaacagaaaggccaatgctgtagaaataggacaagtgatgaaagatataatagaagtgaaatataaaaatgaatacacaaatagaacttatatttttcttacttgttttgtttttaggggtagtaacctaagtatcagccaccaaaggaaagaggaaagcataaatccatgagggcagtgatctatttccttgaacacagaatctaggacctagaagtttctcagccctacagtaggcacccaataaatatttattgagtgaatgaacaaatgaatatttaaggacagtgggagttaatttctttggtatttacatcttagtaccaaggattccagtgagctatagagaactattcttaatgatttcaacatcagctaggccaagttggctgtaaacattatctgatttcctgaagacaatgaacagctttctagcctttaacttattcaaacattaagagttaacagacaatccttgcattcctacacagaacttccttttctctgaaaacagagggtagagcccaaacttaaccacaagaggagaaactgctacatgttggcagttttgacagaataacttaaaaacatttttattcttcttccttctaaatgttcatacaacatgatttctcaatacgagacaaatttcatgctagagtttaaaggataagaaactaaagcaaagacaaaaggtaggccagatgcagtggctcacacctgtaataccagtactttgggaggccgaggcaagaggattgcttgagctcaggagttagaaatcggcctggcagctgggcacggtggctcacccaggcacggtggtaatcccagcattttgggaggctgaggtgggcaggatcacctgaggtgaggacttcgaggccagcctggccaacatggtgaaaccctgtctctagtaaaaatacaaaaagtagatgggcatggtggcagacgcctgtaatcctggctattcgggaggctgaggcaggagaatctcttgaacccaagaggcggaggttgcagtgagcctaaggttgcagtgagctgaaggttgcaatgagccaagattgtgccacttcactccagcctgggcaaaagagcgagactctctcaaaaaaaaaaaaaaaaaaaaaggaagaaactgtctgggaaacacaggaagacatcatctctactaaaaaaaattaaacaaaattaggcaggtgtggtggtgtgtacctatagccccagctacttggggatctgagacaggaggatggcttgagcctaggaagtcgaggctgcagtgagttctgatcatgccactgcactccagcttgggtgacagagcaagactctggctcaaaaaaaaaaaagaggctgggtgcggtggctcaagcctgtaatcctaacactttgggaggccaaagtgggtgttcatctgagcccaggaggctggacaacatggcaaaaccccatctctaccaaaaatacaaaaaattagccaggggtgatggcacgtgcctgtagtcccagctactcggcacactgagatgggaggatcacttgagcctgagaggcagagcttgcagtgagctgagattgtgccactgcactccagcctgggtgacagagtgaggtcctttctcaaaaaaaaaaaaaaagaaaaaaggaaaaaaagtatgccaagagtttctgaaaaggttaaacaaaaagttaccatgtgatccaccaattcctagctatattctaaaacaactgaaaacatgtccacacaaaaagttgtctacaaattctttacagaagcattattcataatagtcaaaagtggaaataatccaaatgtccattaattgatgaatggataaataaaatgtggtatatccacataacaattattcagccataaaaaggtttgaagtactgttacatgctaccacatcaatgaaccttgaaacattattctaagtcaaagaagtcagtcacaaggggctacatactgtatgagttcatttatatgaaatgaccagaataggcaaatccatagagacaaagtagttttgtggttgccagggggtatgggagtgacagctaaggagttcttttgggggtgatgaatatatacttgaattagacactggtgatggttggacaactctatgaatatactaaaaaccactgaattgtaaactttaaggcatgacttttacggtgtgtgaattatatctcaataaaaaaagtcacatgccaggcagcacagtggctcacacctgtaattccatcaccggaaggcagaggtgggaggatcttttgagcccaggagttggagaccagcctgggaaacgtaacaaaaccctgtccgcacccccgccaaaaaaaaaaaaaaaaaaagaaaagaaatcatctgccaaaaagatataaaatcagcaagtaaaaaatacagacgacaggtggcatcccttcctctctgctcttctcatgcttctcccatgcaaaatccttgactaaagtgccatatattttacagttattctgaaaatgactggaaccctaaaaatatccaaaccaccaaacaaaagcagctgcttactttgataatatttttgtaccatagaccttccttaaaatgcaagttgacagaggacttatgccacaaacccaaacatgcacaatccactagagttagcttcgagagatgctgttgtaactgccactggcacaaaacacattcccaaaagagactcacactcacaaaagagaactacattattactcagtctagtcagaaggcaatgtcatcaggaacctaattgtgatcgatgttcatttagtgttttctgtctgaagcccaagacaatgggcctcaaaaacaaaacaaaacaaagctcataataaactaaaccacagaaaagcatgtcctgtatttaaattgttggatataaaattgaaaaaatacaggtttgaaaattgaatactgaaccatctagggtgtaatcacgattttttttaatgcatccaatatcaagagaaattaattactcccaggtgctaaactcactcatttagtgtcaactctgattcttaattgctaatacaaaaacaataatcatggtcatatagaatacatcttaactgactgaaatgttagatggtattttaatatctttcttttcatacaatgtcttacatctagagtccctatttcaaaatagcagaaggaataatgcagatattttcaaagagaaatagagatgagtgcattgaaaggccttgaaaagtattcaccaaatcagcataatcatatctagattctgcttccggtttcgccactaaaatgcaaatgatgtctggcctacactggctttacaaatatttttaaatatataaaacccggccgggcgcggtggctcacgtctgtatcccagcactttgggaggctgaggcaggtggatcacgaggtcaggagttcaagatcatcctggccaacctggtgaaacctcctctctactaaaaatacaaaaattagccgggtgtggtggcgcagacttgtaatcccagctactcaggaggctgaggcaggagaatcgcttgaacccgggaggcggaggttgttgcagtgagccgagatagtgccactgcactccaccctgagcgacacagccagactccgtctcaaaaaaaacagattatatatatacatacttatatatgtttgtatatgttttatatatatatataaaacccaaaacatgttgagtcgttaatgatgagaatatccaaagacactgttagcacagcacttttctaccattttcaggttatatgcagcaaggaagtgctaagacgaccaactagattaatatcaagtatgacccagagaaattcagatggaatcccactcactcaaaaagcacttattaagcagttgcgttaatagtactctgaagattatccgtcctatcgccaattggcagcgggttatatctttttctatatatattcgagggtatagagaaaccatatggctttcctgtatctttgataactcttgccctgtgaaacagataactgcaccacttgaaattatatttagcttttcctttcagcactcctctcttaaaatctatttttccatttctctatacctttgtattccctctctcaaggaaaaggaaatcattttccttctgctcttccaacatagcttcaccttcaccttaaattttaaaccttctagaacaggattactctaaatgattttttaaaaagcattcaagatcgtatgacatattattcaggcattaaccgcatttattgtcaaatgctactgcttctcaatccctacctctccctcactctcgccccttagtcctccccttccaatatccattttgtctccactttcagctctcccaggtcactgtcccacctcttcctcaggctctctaaaatcaatgcctccccgcctacccaccgcaggttttttaccagtctcctcctcccccgactcatcactacccgcatgaccccctcggattctgctctggtccctcactctcccaaacttcggaggccaccgctactcccatcgctgccccacagtttagtgaacgctcctcacaccctccctccacccccaaaacttccccttacgacctccccaactcccaccttccccgttcccagactccattaggtctcctttcaaatgaatgcctcttccctactccagagttttcggacagtcccacccctcaaagccctcccagccttcgcccggcatccgcgccacccccgggcccacagcgcccctgtgggtgtggccctccgacctgcctccgcgcctcacgcagcccctcaagccggtgacccagctcccgccggtagctctgcgctgcctccacgttctcgcgggcctcctgcaacagcagctcaggctccagctccatcgcccccctcatctggccgcgcggccggcgaaacctagcgcgggttcccgactgcaccgggcgcctccaagcggcccggcgcggcctcgcgcaggcggaagcaccgcccagccccgccgccccatgccccacgacgaccttgattgacgggcgcacggcggcgcctcgcgcgggtggcgtccgggtcccagcgccgcccgccccgcggctcaccccgcctcttccgtgctgcggcacagcgccgctggttgggcctccttgggaaacgtgctgaggcctggcaaggttgataacccgcaccttgccaagtgcttctcacagctcatcgcattcttgcctgaccttcagccctacctgtatctccattgctcagatgaggaaattgagggataaaggggggaatcggccgggcgcggtggctcacgcctgcagtcccagcactttgggaggccgaggcgggcggatcccttgagctctggagttcgagacccagcctgggcaacacggcgaaaccctctctcaccaaaaatactactactattactattactactactactactgctactactagcaacacgtagtggagcacgcctgtggtcccagtggatcgcttgagcccgggggccgaggctgcagtgagctgtaatggagccactgcactccagcctgggcgacagagcgagaccctgtctctaaataaaaaatacttttttttaaattaaaaattttaaaaaatagcgaatcgacttttccaagccgcagaatttgagcccagatctgatgacaaaagccctggtccttaagagcagagcaggccttaggggaatttactaagacccaggtgtcagcggggagcagtggctcacgcctgtaatcccagcactttgggaggccgagacgggtggatcactgaggtcagaagttcaagagcagccatggccaacctggtgaaacctcatctctactaaaaatacaaaaattagccgggtgtggtggtgggcgcctgtaatcccagctactcgagggctgaggcaggataattgcttgaaccgggaggcagaggttgcagtgagccaagattgtgccactgcactccaacctgggcaacaaagcgagactcggtctcaaaaaacaacaacaaaacccaggtgtcaccacccagaagctcgtggacgaatgggggatccaagagagaggcccaagagatgaccagcaggacagcaattctggcacaagtccaagaagggtgttggcaagtgttatctgtaaggaccgtagtgaataagctgggcttgggcttgccagaccggaaggtatctgtcacaataggtgtgactgtatgtaataaaaccttatgggcagggcatggtggctcacaccagtaatcttgggaagctaaggcaggaggattgcttgagcccaggagtttgagaccagcctttgcaacatgaggagacctcctctctacaaaaagatttaaaaaaaaaattagccgcgggtggtggcgccctcctgtggtcccagcaattcaggaggctgaggtgggaggattccttgagcctaggagttagagaccaacctgggtaacatagcaagaccctatgtctataaaaataaaaataaataaataaataagtaaaattacaaggaaaacttccataaaaccaggacatgaatcttggtctcattcaactttgttttcttagtctgatggaaggcaagaagtgtgtatctaacatatctacactatacccaaaaacaaaacaaataagaaaattgaaggaaatattctaaaactgcttacccctagacttgacatttttagatgcattgtttttaaatttagagcatgaattcctaaagagtaaatgttctcgaggaaactggtttagaagtagatgtcagctagccatcagacagagttttacagagatatctccatggcatcacattggtccagaactgacttttcaagtgtacccagaggattccagggaacagactcttgctaataagactcacaagaaacaaactaagcagcttgccaatttatttatttacaacaggaatataattgttgaaaaaaatcacaatagctggaaaatcaagttataaccagagagttggattcagatcagaatacgttggtcatctggtcagcaaaggctttttccctctcctgtctccaacctcttctcagaaagctcctaactgggctgggtgtggtggctcatgcttgtaatcccagcactttgggaggcctaggtgggtggatcacgaggtcaggagttcaagaacaacctgactaacagggtgaaacctcatctctactaaaaacacaaaaaattagccgggcttggtggtggcgcgcacctgtaatcccagctactcaggaggctgaggcaggagaattgcttgaacccaggaggcagaggttgcagtgagctgagatagtgccactgcactccagtctgagcgacacagcaagactacgtctcaaaaaaaaaaaaaaaaaaaaaaaaaaaaagaacgctcctaactgtactggacacatagttgacaattttttgctctctgactccacctttcattccagctttttttttttgagacaggggcttgcctgtcacctgtcacacaggctggagtgcagtgacacaatcagggctcactgcacccttgatctcctgggctcaaacgattctcccacctcagtctgcctagtaggtaggattatagacacctgccagtagacccagacacttctttaatttttttgtttgtttgagacagagtctccctctgtcgcccaggctggagtgtagtggcaccatctcggctcactgcaacctccacctcctggattcaagcaattctcctgccacagcctccagagtagctgggattacaggcgcccactaccacacccagctaatttttgtgttttctttttttgtttttgtttttttgagatggagtcctgcactgtcacccagcctggagtacagtgacatgatctcggctcgttgcaacctccgcctccctggttcaagcgattctcctgccccattctcctgagtagctgggatcacaggcactggccaccacgctcagctaattttttgtatttttagtagagacggggtttcactatgttggtcaggctggccttgaactcctgaccttgtgatccgccggcctcagcctcccaaagtgctggaattatgggcgtgagccaccacacctggctctaatttttgtattttattagacatgggatttcaccaagttggccaggctggtcttgaactcctaacctcaagcaatccatccactttggcctccaagtgttgggattacaggtgtgagccactgcacctagtcttaattttttttttttttttttttttgagatggagtcttgctctgctaaccaggctggagtacagtggcacgatctcggctcactgcaacctccgcctcccgggttcaagcaattctcctgcctcagcctcccaagtagcaaggactacagctgtgagccaccactcccgttaatttttgtagttttagtagcgactgggtttccccatgttggccaggctgatcttgaactcctgactccagatgatccacctgcctcagtctcccaaagtgctgggattatagttgtgagccactgctcccggcctcagccttacattttttttttttttgtagaggcagggtctctgtatgtttcccaggctgatctagaactcctgggctcaagcagttccctgccttggtcttccaaagtgctctgattacaggcctgagccaccatgccccacccatattttttctttattttcttcctttctttaatttttttgagacagagtctcactcttatgtcatccaggctggagtgcagtggcgcgatatcagctaactgcgacctctgtctcccgggtttaagtgattctcagcctcctgagtagctaggattacaggcgtgcgccaccacacccggctaattttgtatttttagtagagatgagtttttcactatgttggtcaggctggtcttgaactcatgacctaaggtgatccacctgccttggcctcccaaagtgctgggattacaggcgtgagccaccccgcccagacaacaataacgatttttaaaagtaggtgttagacacatggggaagataatctgaaatgacatgggcactctgtaaactgtgaattgctttaccatgtgagagttcatttagattaaaattgataaaagccatgagctcctaaataagggttggtaaaatactatgtatctaaaactactcagtggaaatgcttaacaacttaatgcagtttaaatgctttgtaactcagaagaataaaaagcactagagaacaccgtatataacccaacaatcccatttctagatgtgaatcctagagaaacattacacgtgttgaagaaaacatggacaagactgttcattgcctcagcatttgaataacagaaaattggagacaatttaaatattcatcagtaaggaaatggatacaggtggctcacctgtagtcccagcactttggaaggccaaggagggaggattgcttgagcccaggaagttccagaccagcctgggcaacatggcaaaaccctgtctctacagaaaatacaaaaattagccgggcattatggcgaacgtgttgtcccagcaaattgggaagttgaggtgggaggatctcttgagccagggatgtggaggctccagtgagcagtgatcacgctactgcactccagcctgggtgacagagtgagatcctgtctcaaaaaaataataataatacaacctgggcaacatggccaaacctcttctctacaaatacaaaaaattagccgggcgtggtagcgcactcctgtagtcccagctacttgggaggctgaagtgggaggattgcttgagcccagaagtttgaggctgcagtgagcagagatcatgccactgcactcaagcttggtgacatagtgagaccctgtctcaaacacaaaaacaaaacaacaacaataaaaatgataataataaggaaatgaataaataaaatgagttgcataaatagaatgttcaggaaagaaagggaatgaatcaaatctatatgtatcatggatggcttttgaaaaaagtgttgaatgaggcctggtgtggtgtctcacgcctgtaatcccagcactctgggaggcccaggcgggcagatcacgaggtcaggagttcaagaccagcctgaccaacatggtgacccatctctactaaaaatacaaaaaaaaaaaaaaaaaaaaaaaaaaagccaggcatggtggcacgagcctgtaatcccagctactcaggaggttgaggtaggagaatcgcttgaacctgagaggtggagattacagtgagccaagatcgcgccattgcattccagcctgggcgacagagccagactccgtctcaaaaaaaaaaaaataaataaataaataaaaagttgagtgaaaaaaagcaaattggctgggcacagtggctcactcctgtaatctcagcactttgggaggccaaggcaggtggatcacctgaggccaggagttccagactagcctggccaagatgttgaaaccctgtctcttaaaaatacaattagctgggcatggtggtacgcacctgtagttccagctacttaggaggctgaggcaggagaatcgcttgaaccggggaggtggaggttgcagtgagcagagattgcgccactgcactctagcctgggtgacagagccagactccacctcaaaaaaaaaaaaaaaaaaaaaaaaagcgcggtgccggacgcagtggctcaagcctgtaatcccagcactttggggagccgagttgagcagatcacctgaggtcaggagttcgagaccagcctggccaacatggcgaaaccccgtctctactacaatacaaaaattagccccgcatggtggcacgcgcctgtagtcccagctactcgcgaggctgaggcaggagaatcgtttgaacccgggaggcggagattgcagtgattcgagatcgtgccactacacttcagcctggtgcaacagagggagactccgtctcaagcaaacaaacaaacaaacaacaacaacaaaaacgatgcactcaaacaaatgtaacatgctgtatttaatgtaattgcaactttaacgtaaaaaaaaaagagctattttaccaaggacccaccaacatggggcgcgttcgcaccaaaaccgtgaagtaaagaaggcggcccgggtcatcatagaaaagtactacatgcgcctgggcaaagacttccacacgaacaagcgcgtgtgcgaggaaatcgccattattcccagcaagaagccccgcaacaagatagcaggctatgtcacgcatctgataaagcggattcagagggggccagtaagagagaggtatctccatgaagctgcaggaggaggagagagaaaggagagacaattgtgttcccgaggtctaagctctggatcaggagatcattgaagtagaatcctgacactaaggaaatgcagaaacttttggacttcggcagtctgtccaacctgtaggtcactcagcctacagttgagatgaatttcaaaacgcctcggggagctgtttgagtctttctgtaatgctgtaatattttcgataaacctgggacagtgaaaaaaaagaaaagagaaaaagtaaaggctaaccaaacccatgaaaacaatgcaaatgatgcatgagatcagaaaccagcaaactactggtaggtaccctgcgaggactgaacgcaggccaaccagatgaagcaatgactcggctgttcgagaggatggaatccacagaaagaaatgccttcttagtcgaataggtacttcgacttttataggtataaaagtcgaatttcggatcctgagaggacgtatattgaggtggaaagctcgcccaaatattagcattttattgtgcatggtaacaatgtaaatcaattatttcctttttctgcatttttcaaatttcgcctttaaagaggggctagcctagggcgttaaaagtctaaattttaattctgtcaacaactgactaggtgacttagtgaaatcacgtcctcaacggtgaaactgataggacagaaattcaaatttccaaactcccgggttggctttcaattccacggtgcaatggttccgcctcccgcgggttcgccgagggagtcattttggccctctcggctcaccgtccgcgcagcctcctgaagcagccgtaaactccgccccttgcgcgcaggacggcgcgaaaacccaattgacaagaattccctccgaagctctgtggtccgatctgcggtccgcttgctttccctgcccggtcccgagcgctcagcctgaagcgccgctttcgagggcaccctgcatacactggccgcgcctcagggatctcattgcccgcgctttctcattgcctctttccgtgttcgattcggctgatctgggcccagcctccgctcccgctctctgtcggtgggcgcgggggaatccgaaacggctcagcagaatcccagcagcttgctgctactggagcgggccgcctccatggcctccaggcaggccgggctggaccgcgtgaggtcctaggagacgggattccgggaagcggggagtatggtgggggtcctggccatggcggctgcagctgctccgcctcccgtgaaggactgcgagattgaggtgaggttgagtcgaggatctgttgagttccttcctctatcttttgggggattggaaggtgggtcttggcggaaggtgatcctgactttgtaaggggaaaggtgggacattgtgaggacccacagctgtgacacattgtgtgcaacagttgccagagtgtgtcgtttagagtcgtgtcaagtcctgataaacatttggattctgagatatttgcggggtcacagtaaattggggacttaagataacacggccagttcccagatcccgaaatgttggtggaacgtgatgttttggacttccgacatgtcacagaggatcccagggtcaagttctgggttcgtgatacggaatcactgaactttagcgctgaagaagatctttaagttaaactagttcatacatccacctgtgcttggaatgccactttagaatgtcactacagaaatcaagcaaggtacttaaagaaaacagtttctcatggcttagtatctgcggttaggaatcgcagtgtaacatgttcttttgggtttatcaggtttcagtgacaggcactaagcggtcattataaagagattctaatgccatgaagtagtgggctagcatcttaaggtagacttgttatattttacaccttttcatctcagactagcattctaactgaagcatgtatcttggcgtccttgaagagagttaagatgtatgtatgttcatttaactgcgaccagttgtttttttcagaatctggtgacttgtctacttagtttttgtttttgtttttttttgtctacttagttgttatgctgatattcctttgctaaatcaaggcagttagttactcagcttgtcttctggtacttgatgtacacagttcttgatttctatgtggtctgttttatcaatctttccgttacagtttctggttttggtgccctaatgctaagaaaccctatttcataataatgatacttaccatttaatatgttaggggtaagaaccttaaacacattattttgcttaatagcaaccctatgatctattgtctgtattctacaaatgaaagaaggtaaaaagtagctaaaagtaagttaaattttttgaaaaattaaatggaaaagttaaaagtaatttgcttaacgttttacaccagtaaatgtcagagccagcatttaacttagatttgcctgactccagagcctatgtatgttgcctttgatacaattgcagctttataaataataactgaatggcgtttttctaatacatgtatggtttctttttgttttttgagacaaggtcttgctctgtcacccaggctggagtgcagtggcacaatcttggctcactgcaacctccgcctcccaggttcaagtgattctcctgcctcagcctccggagtagctgggattacaggcgtgcaccactatgctcagctaattttttgtatttttagtagagacagggtttcaccacgttggccaggctggtctcgaattcctgacctcaagtgatccacccgccttggcctcctgaagtactgggattacaggcgtgagccaccgcacctggcctggtttaactttaaagcctattttctttctaatatatcacgtttttcacctaaaggaggcttcctttttttaatcctattatgtaaactattagatccatgtttaaaatttatattttgtattatattgcttgaaataagtgcctttttctcttttaaattgccagccatgcaaaaagcgaaagaaagatgatgacacatctacctgcaaaacaattacaaaatatttatcaccactagggaagactagagacagggtttttgctccaccaaaacctagtaatattctggattattttagaaagacttcacccacaaatgagaagacacaattagggaaagagtgcaagataaagtcacctgaatcagtacctgttgacagcaacaaagactgtacgacacctttggaaatgttctcaaatgtagagtttaagaagaaaagaaagagggttaatttatctcatcaactaaataatattaaaactgaaaatgaagctccaattgaaattagtagcgacgatagcaaagaagactatagtttaaataatgattttgtggaaagtagtacttctgttttacgttacaagaaacaagtagaggtacttgcagaaaacattcaagatacaaaaagtcaaccaaatactatgacctccctgcaaaattctaaaaaagtaaatcctaaacaagggaccacaaaaaatgacttcaaaaagttgagaaaaaggaaatgcagagatgtagtagatctatctgaaagcttacccttggcagaggaactaaatttgcttaaaaaagatggtaaagatactaaacagatggagaatactacaagccatgcaaactctagagataacgtaactgaagcagcccagttaaatgatagtataataactgtctcatatgaggaatttttaaaaagtcacaaggaaaataaagtggaagagataccagactctacaatgtcaatttgtgttccttctgaaactgtcgacgaaatagtcaaaagtggttatataagtgaatcagaaaactccgaaatttcccagcaggtacgctttaagacagttactgttcttgcacaggttcaccctattccgcccaaaaagacagggaaaataccccgaattttcttgaaacaaaagcaatttgaaatggaaaatagtttatctgatcctgagaatgaacagacagttcagaaaagaaaatctaatgttgttatacaggaggaagaattagaattggctgttttggaagctggaagttctgaagctgtgaaaccaaaatgcactctagaagaaagacagcaatttatgaaagcatttaggcagccagcatcagatgcacttaaaaatggagttaaaaagtcttctgataagcagaaagaccttaatgaaaaatgtctatatgaagtaggaagagatgataattctaaaaaaatcatggaaaattctggtatccaaatggtttcaaaaaatggcaatttacagttacacactgataaaggaagttttctgaaggagaaaaataaaaagctaaagaagaagaataagaaaacattagatactggggctattccaggcaaaaacagagagggaaacactcaaaagaaagaaacaacctttttcttaaaagagaaacaatatcaaaatagaatgagtttaagacaaaggaaaacagagtttttcaaaagcagcactttatttaacaatgaaagtcttgtttatgaagatatagcaaatgatgaccttctaaaggtttcctctctgtgtaacaataataaattgtcaagaaaaaccagcataccagttaaagatattaagcttacacagtctaaagctgaatctgaagccagcttgctaaatgtttccacgcccaagtcaactagaagatctggaagaattagcagcacacctactacagaaaccattagaggtattgattctgacgatgtacaagataatagtcaactaaaggcttccactcaaaaagcagccaacttatcggaaaagcacagcttatatacagcagaattaataacagtaccctttgattcagagagccctattaggtaaggtttgtttttgttctaacgttctagtattctgcatgtattattagctggggacaaaaatgcttcaagtattggagggtatttttttttctagaacacagctgtttaaaagaaaaagaacaggatttcttttttttttttctttgagatggagtcttgctgtgtcgcccaggctggagtgcagtggggcaatctcggctcactgcaacctccacctcccaggttcaagcaattctcctgccttagcctcccaagtagctgggactacaggcacccgccaccacgcccagctaatttttgtatttttagtagacatggggtttcaccgtgttggtcaggctggtcttgaacccctgacctcaagcaatccacccacccggcctcccaaagtgctgggattatagtcgtgagccactgcgcccggcctggaagaaaaagaacagagcttcaaaaatgcttctttgtttgccacatgtaattaaattttttttttaattttaatttttaatttaatttaattttattttattttgagatggagtctcactcactgttgtccagtctggagtgcagtagcacaatctcagctcacgacaacctccaccttctgggttcaagtgattctcgtgcctcagcctcctgagtagctgggattacaggtgcgtgccaccatacccggctgatctttgtatttttagtagagacggggttttaccatgttggccaggccagtctcgaactcctgacctcaagtgatctgcctgcctcggcctcccaaagtactgggtttacaggtgtgagccaccacacccggcaagtttgattacttttgaatcagtggtttgaaactgatgggaattatttttttcctcctgtttcagaacattccagaaattggagccctagttggttctttgctgtctatctatctgtctatgcatctctatctatctctctggaaacaagttctcactgtgttgcccaggctggtcttgaactcctggggtcaagcaatccttccatattagggtcctgagtagctgggattacatgcagatgccactgcaccagctctattttatctatatttaattgagattcttgtgtatgttataatcatgaaaatgtttctgaataccttatttttatttcagaatgaaattcaccagaattagtactcccaaaaaatctaagaaaaaatctaacaaaagatctgagaaatctgaagcaactgatggaggttttacttctcagattagaaaggtaattaaaatattagagagtcctataagtgccattctgtttccttaaaaaacaaacaaaaaacccccacattactatgggaagtaatgagccaaaataaaattcatgtatttcataaattggttaactacaaccctatgatatttttcactattatcctgttcctctagttaattaagatatcttattgtgaggtgaaagcaattgataaaggcagagtataatttacttataaaaagctttcttagtgagtttacatcgtgatcatttttcctaacactgccgatcttagtttgggctcctgtagcaaattaccatagactgagtggcttaaacaacagaaacatatttctcacagttatggggattgagaaatgcacgatcaaagcatcagctatgcagtgtctggtgaagctgtcttcttgttttctcacatggtagagaacagctagagagaggggtctccaccctcatgacctaatcacctcctaaaggccctacctcctaataccattacatagtgggttaggattccaacatatgaattttcaggggatgtattcagtctgtaacactgcctataggtcatgattgaatttttcatttatttctatagattatagagactgaaaagcagagtttctcaaccttgctattattgacattttggctggataattctttactgtggagggctgtcctgtgcattgtaggatgtttagcaacactctggcctctatccataagatgccagtagcacccaactaactcctgtataatgacaaccaaaaatgtgtccagacattgctaaatatccctcggaggggaaaataatcacttccacttgaaaaactacagctctaaagggagaagtaagatacataagaatggtttagttgtttcggcaaaataagctccttgtccccaccatggcagaattggagtaggtacaggtatgtgtatttcgaaaaagccaccaaggtgactctgaattaatccttgagtgaaaaccactgctacattggtatctcctttggttttatttaacagctgtcattttttggcatcttaccacattctaggcagtgtgcttagtactcacatcattaatctcataaagtaaatattatttaacccttttttatagatgaagaaacttgctgttagttcatagggtgaggaaacgtgtttttatttgtgattctgggaagtgtctttcctagagttatacaactacaagcagttagaaagacggtctttagtcttttggaaaacatgcgagatgccagctgattgtactacagctaaaggttgaaagtctctttggtgaactttgtcccacatattttattcttcttgatttcattctagaggacagcttcaactttaatttttttagagataattataccttggtttgcctcatgtactacttaaaattgggatttaatagtaaattttccagcaagagaagtctcaaaattaaatgtatccaaattgggacctttatccaaacttacttagatcagttattttatctcatactctgtcaatggacttcttaccacagggcccttgttgttcactgaagacttatccagccttgtgtactagctctaggagaaaatcttagtaattttctgggtgagatttttcttttttatttcttttttcttttcgtttgttatttttgtagagacagggtcttgctattttgcccaggctggtctcgaactgctagcctcaagcaatcctccagccttggactcccacagtgctgtgctggttggtattcaggcatgagccactgtgcctggccagatttttaatgtttctatgagaataaggagtaaactggttcccctaagagccccatattcataacagcttattgtttatcctttcagataatagtttaatagttagatttttttctctccagatattttttctctgcttaaatagatatatcttttttttttttctttttgagacggagtcttgctgtgttgcccaggctggagtgcagtggcacggtctcggctcactgcactctgcttcacgccattctcctgccttagcctcctgagtagctgggactacaggcacccgcctccatgcccagctaatttttgtatttttagtagagatggggtttcaccgtgttagccaggatggtctccatctcctgaccttgtgatctgcccacctcggcctcccaaagtgctgggattacaggcgtgagacactgcacccggccatcttcttttttttttttttttgagatggagtttccctcttgttgcccaggctggagtgcaatggcgcgattttggctcactgcaacctcggcttcctgggttcaagcggattctcctgcctcagccgccccaagtcgttgggattacagacgcccgccaccaagcccagctaatttttgttatttttagtagagacgggggtttcgccatgttgacccagggatgtctggaactcctgacttcaggtgatccacccacctcggcctcccaaagtgctggaattagaggcatgagccactgtgtccagactctttcttctttatcatatataagaagcttgaggctgggtgtggtggctcacgcctgtaatcccagcactttgggaggctaaggcaggcagatcacctgaggtcaggagtttgagaccagcctggccaacatggcgaaccccatctctactaaaaatacgaaaattagctgggtgtggtggtgtgcacctgtagtcccagctacttgggaggctgaggcaggagaatcacttgaactcgggaggcagaggttgcactgagccgagatcatgccactgcactctagccttggcagcagagctagactctgttaaaaaaaaaaaaaaaaaaaaaaaacaaccttgaggccaaggtccatgtattataatactgttttctttatagtatccagcctagagccattcatatagtaggctgggtaactgtttggatttggaaagtactttgcctgaatttggtgactaaaattaaaaaatagattgccaagtctatactacagacatcctcttgggtgttttgctcacatgtaaatatatttacctggatgatttcaagtaagaaataaaggcaaactaatgataactagacacatttcaatttaaggcccctggtaagatttgaataaccatttctttgttgattatttaatgtgatttgtgattgtatttttttctattattaaatataaaatattttcttgtgatgtaaattaatgtttcaattttttgtttaggcaagcaatacttcaaaaaacatatcaaaagcaaaacaattgattgaaaaagcaaaagctttacacatcagtaggtcaaaggtgactgaagaaatagcgatacccttaaggcgctcctctagacatcagacacttcctgaaaggaagaaattgtcagaaacagaagtaagtattataaatatctgttggtataaattctctcctattttgctgtttggagtgggagaaggaaaccattataaagttataaggtaggtttgtgtgatagcttgaagtggtagagagaatatcattttcagttttgctttaaaagccttctgcttttttttgtctgcagaatacagtttgaatccttcttaagtcactcaagatctttcataagctgaactacctcttccttttttttttttgagacagagtttcgctcttgttgcccaggcgagagtgcaatggctggatctcggctcactgcaacttctgcctcctgggttcgagcgattctcctgcctcggcctcccaagtagctgagattacgagtgtgtaccaccatgcccggccagttttgtatttttggtagagacagggtttcacagtgattggccaggctggttttgaactcctgacctcaggtgatccacctgccttggcctactagggtgccagccctcttgcctttcttcaaaacgactctttgctctagtcacacagaattgttcatttctccctaaatggtgcagttttcacggtatttgttttattgttatcagcttgaaatatacgttccaagtactctcttctatgtgaggaattcctacttaaactttgagatcctgctaactgccagtacctctttctaataaaatagtttgagatataattcatatacatgcatttcaccatttaaagtgtacaattcagtgacttttgtatattggaagagttgtgcatccattaccgtagtcaattttggaacattttcatttccccaaaaatagactcttttcttcttggttgtcaccccccaatcccctcattccaccagccatagctaactactaacctgcttctgtctctgtagatttgcttgttctggacatttcatatcaatggtatcatatagcatgtggttttttgtgtctggcttctattacttaggatgtgttttcaagatttatgttacagcctcagtatttcttttctttctgttgccaaatatcccattcatcacctgatggacatttgggttgttttcactttttggctattctgaacattttaccccctcctcttcaaagctgtgcttgtattcaagactcttctggttgaatatataaaaagaaaaataaaaacaaattaaaaaaataaaataatgggatgggcacagtggctcacacctgtaatcccagcactttgagaggctgaggcgggaggatcacgaggtcaggagtttgagaccagtctgaccaacatggtgaaaccccgtctttactaaaaatacaaacattagccgggcatggtggcgcgagcccgtaatctcagctactcaggaggctgaggcagaagaatcacttgaacccgggaggcggaggttgcagtgagctgagaccacaccattgccttccagcctgggtaacagagtgagactccatctcaaaaataaataaataaataaataaataaataataaataaaataaaatagtgaaaataatgaatactgtgcttgctgatgccttcaagacaaatattttctttcctgatatgtacttttgtatatttttttgtgttgatggtgcactcaccatgctgtattataactagttaaactatctgctcatgggctagctctccctctctcccctacattcagatgtaacatttgatgccaattcttgaattttgtctgtgtattcccaatttcttctatattgcttcacatatggtaagtgctcggtaaatctatgctgatgacaggaaaatcacagacttcattacatttctaggatgtacagttccaacagggctataaccagactttttatagcttggtcatattgactgttttatttggagtacagtctgttagttgctttttaaaaattttctgcatatgaataccaggtcatatgttagttgctttattttttagacagagttttgctcttgttgcccaggctagagttaatggcgcgatctcagctcactgaaacctccacttcctgggttcaagcgattctcctgcctcagcctctcgagtagctgggattacaggcatgcaccatcacacctggctaattttgtatttttagtagagacggggtttctccatgtttctcaggctggtcttgaactcctgacctcaggtaatcccccctgccttggcctccccaagtgctgagattacaggcgtgaaccaccgtccggcattagttgctttttcaaaaaagaaagcctttttgggcctggtggctcacgcctgtaatcccagcactttgggaggccaaggtgggaggattgcctgagcccaggagttcgagaccagcctggtcaacatagggagaacctggctctgcaaagaacacaaaaattagccaggtgtggtggtgtgcgcctgtagtcctggcttcttgggcagctgaggtgggaggatggcttgaggtcgggagtttgaggctgcagtgagccatgatcatgttactgcactccaccttgggtggcagagtgagaccctgtcacaatttaaaaaaacacatgaggccaggtgcggtggctcactcctgtaatccccgcactttgagaggctgaggcaggcggatcacctgtcaggagttcgagaccagcctggccaacatggcgaaaccccatgtctactaaaaatacaaaaattagctgggcgtggtggcgcgcacctccaatcccagctacttgggaggctgaggcaggagaatcacttgaacacgggaggcggaggttgcagtgagccaagagtacaccactgcactccagcctgggcgacagagagagactccatttcaaaaaaaaaaaaagaataaaaataaaaaagaaagcccatggtcataataaacgtaccctgatatcatataaacttgtttgatgtaagcatggactcctgctattctattgtgtgttttctgtttcaatgagataatatctgatgggaggtgtatggagctgctaattatgttttctgtggtttctatcactgtgattcttttgaaatttcaatgatattaattatatgatttaattaaaatttattctcttattttgtcttaggattctgttataataatagattcaagtcctactgctttaaagcatccagagaaaaatcagaagaaacttcagtgtttgaatgatgtgctaggaaaaaaacttaacacatccactaaaaatgtacctggtaatcagagttaataatatttatgatgtatattagaatgttttggggtttttgttttgttttgtttttgtgttctggggtatttatttatttatttatttatttttgagacggagtctcgctttgtcactcaggctggagtgcagcgccggcgggatctcggctcactgcagcctccacctcctaagttcaagtgattctcctgcctcagcctcctgagtagctgggactacaggcacccaccaccatgcccggctaattttttgtatttttagtagagacggggtttcaccatgttagccaggctggtctcgaactcctgaccttgtgatctgcctgtcttggcttcccaaagtgctgggattacaggcatgagccactgcacccggcctgtgttttggggtattattctgaacgtgcttatgattgaaatttagtatcttatgtaaaattttaactgtattatatttctattttagtaagtaaagttatggtatagtgaagagtttttctttttttttttttgtgacagagtcttgctctactaaaatacaaaaaattagctgggtgtggtggtaggtacccgtagttccagctactcgggaggctgaggcatgagaatcacttgagccctggaggtggaggttgcagtgagccaagatcgtggcactgcactccagcttgggctacagagtgagactccatctcaaaaaaaaaaaaaaaaaaaaaaaaagaaagtagctgaaggtggagatggtaaacattgatactaacccaagtatttatttttctaaggaaaaatgaaagtcgctcctttatttcttgtcagaaaagcacaaaaagcagctgatcctgtccctagttttgatgaaagcaggtcagtccaatacaaatttttaaatgccaaaatattttatagaatgtatttgtattgatgtgtttactttgatgagaaagcatgtgaattatcatttgaagctctagtaagtccagtttcaaagttgacaatattgacagtgctgcaactgctatttgaatatcttggttttttgcaagtgctttggccatcgctagacaaaacagaaaaataagcaaaccaaaaatacaaaaaagctgataatgaattttattcagtaaatatttaaatacctactagtatgtaccaggtactgtttttggtatcagagatattatggggataagacaggacacattccctgtcctcctgtggcttaagtggagatggaagatggtctatgattaaacattcattgggtcaacaaatgaaaaattgcagttgtgctaaggagaggtataattcatattgaggagggttggtctgattaaagaagacttcaatgaggaaatgatgtctgaactgaaatctgagggatgagcaggagttcatcaggaggaggaactgtgtttcagccagagagaactgtctatgtaaagtctctgtagctggaaggaacttgctaaataccaaaaactgatagaatgctagtgtgactagagcacagagaacaagggtgagaggtgggtgccagccaatgtaggacctaggaggccatgttaagggattttatcattatattaagagcaaataagaagcagccaaagggttttaaacataaatatagacctaaacagatttggattttagaagtttaattggcctgctggataaagaatggaatggaagaggggttagagtagatgtaggagtccaggtattgtgagatgatggaggtaaggactaggttgttgggaatgacatatgaaaagattttaggagatgaattaaaaatccctcgatgattaatgagatttgtgggagtgagagtgtgggagaggaaggtataggatgacatgtaagttctagtttatgcgcctgggtggcatgatggaaggtcaggtctaggagcaacatgggtttagattatctttttttctgttcaagttttactgaggtgtaattatatattgttaagcacacatatcttaagtatgcagttttgacaagtgcatcttatcaagaaataacaatcttctttttagctcagaaaggttttgtgtgctctttcctattatccccaccaccaccatcaccacaagattaccaaaatattcgatttctatttccatcaattagtttgatttctattaccatagattaattgtgtctattctagaacatcacataaacttcatatatatattattttgtgtctggctgcttttgcatagtatacacgcccacaaacaaatgcacacatacatatttttaaatcaacttcattcagttatattgtccatataataatatgtgcccattttaagtaaagagtttgaggtttttttttttttcttttttttttttagacggagtctcactctgtcactaggctggagtgcagtggcgtgatctcggctcactgcaacctctgcctcccgggttcaagcgattctcctgtcttagcctcctgagtagctgggactacaggcacgcaccaccatgcccagctaatttttgtatttttagtagagatggggtttcaccatgttggccaggattgtctcgatctcttgaccttgtgatccgcctgccttggcctcccaaagtgctgggattataggcgtgagccaccgtgtccagccaacagtttgaatttttctctcttttttttttttttttgagacggagtttcgctcttgttgcccaggctggagtgcgatggtgtgatatcagctcaccgcaacctccacctcccaggttcaagtgattcttctgcctcagcttcccgagtagctgggattacaggcatgtgccaccacgcctggctaattttgtattttagtagagatggggtttttccatgttggtcgggctggtctctaactcctgacctcaggtgatctggccccctcagcctcccatagtgctgggattacaggtatgagccaccgtgcctggcccacagtttgagttttgacaaatgtacatacctgtaattaccaccacaataaaaatatagaacattttcatcactctcaaaaaaaagtcttcttgtgcctcattgcagttaatttctgcccaatcccatgcaatctcttatctgctttctgttggtatagactagtttgccttttctagactctcatataaatgaaatcctgcagtaggtatacttttgtctctagtttctttggcaaggtagcatatcagttgtctgttctttttcgtagttaagtagtactcatatgaatatgccgctatatatatatagagagagagagagagagagagagatggagtcttgcactgtcgcccaggctggagtgcagtggcgcgatgtccgctcactgtaacctccgcttcctgggttcaagcgattctcctgcctcagactcccgagtagctgggattacaggcatccgccaccacgcctggctaattttttgtatttttagtagaaacggggtttcactatgttggccaggctggtcttgaactcctgacctcgtgatccgcctgcctcggcctcccaaagtgctgagattacaggcatgagccactgtgcctggcctactgcaatattttttatttattctttattaatgggcatttgggttattttcagtatttggctattattaaatagactgctatgaacattttttttttttttttttttgagacagagtctcactctgtcgcccaggctggagtgcagtggcacagtctaggctcactgtaacctccgccccccgggtttatgccattctcctgcctcagcctcccgagtagctgggactgcaggcgcctgtcaccacgcctggctaatttttttgtatttttagtagagatggggtttcaccatgttagccaggatggtctcgatctcctgacctcatgatccacccacctcggcctcccaaagtgctgggattacaagcgcgagccaccgcgctccgcctgactgctatgaacattcttatacacatgtatggacaagtgttctcatttttcttgggtaaataaatacctagaagtggaattgctctgtcattagggaggtacatgtttaacattataagaacctggcaaactgttgtcccaagttgttgttcggttttacactcccaccagcaatgtataagcgttctggtagctgcctatctttgataacacttggcattatcaggcttttttttttttgagacggagtctcactctgtcatccccagactggagtatagtggcgcaattacagcttactgtagccgtgacctccaagggtcaggtgatcgtccctcccacctcagcctcccaagtagctgggactacaggcatgtgccaccatgccccactaattttttgtatttttttttctttggtagagacagggttttgccatgttgcccaggctggtctcaaactcttggactcaggtgatctacccaccttggcctcccaaagtgttgggattacaggcgtgagccacaaggcaaggtcaattctatcaattcaaagtgtgtattttggtgagctttgtcagttgtacacccagtgaaaccaccataatcaagataccaagttatttccattgcctgcctcagacttgtcatgctcttttgtagtctgttctctaagtggccccaacccaggcaaacgctagtctcttttctttatactaatttatattttctagaattttatattaatgaaatcatatagtatatgctcttttgtgtctggcttcttgtaggtggcatgatgattttgagatttattcatgttgtcaaatatatcattagttttctttttcttttctttttttgttttgagacagagtctcgctctgtcgcccagactggagtacagtggcatgatcttggctcactgcagtctccgccttccgggttcaagtgattcttgtgcatcagcctcctgagtagctgggacgacaggcctacgccaccatgctcggctaatttttgtattttttgtagaggcagggtttcaccatgttggccagactgatttcgaattcctgacctccagtgatctgcctgcctcggcctcccaaagtgctaggattacaggtgtgagccaccgtgcctggctatatttttgctcagtagtattcattgtatggatataccactttttgtctctccatacacctattaatggacatctggattgtttccttttgtcttttccctccactataagagatggagtcttgctgtgtttctcagcctggccttgaactcctgggctcaagcaatcttccttcctcagtctcctgagcagctgggactcaaacgtgcaccgctgcacccagctgtttgcaatttgaagctattgggaataaagctgctatgaacattcatgtataagtctttgtgtggatatacatcttcatttctctttttaattttatatatttgaatggctatgtagtcatatctcatagttttaattttcatttttctcatgtctactgatggtgaacatcttgtgattattggccttttgtatgtcttccttagggaaatcttttgccccttttcttactgacttgtctttcttcttgttgagttgtgaggattctttatatattctgactacatgtcctctgtcagatacatgttttgcaaatatattaccttgcctttttatttgttgtgtcttttgaagtacagaagtttgatgacgtccagtttatgggtttgacaaacctaacatttaaaagacacaaagaacctagaatagacaagataatcttgaaaaagaagaaaaatttgaaggcctctacactacctgatttcaagacattgaacaaacctacagtaatagaagtgtgttgtattggtataagaacagaaaaataccagcctgggcaccactgtgggactccatctctttaaaaaagtaaacaactagccaggcatggtggtgtatgcctataggcccagctacttgggagtctgagacaggaggatcacatgagcctgggaggtcatggctgcagtgagctgtaatcatgccactgcactccagcttgggtaacagagcaagatgcggtcgctaaaaaaaaattttttttttgctcttcttcaaaatttgaaaatatataataaatttttgtttattatggtgaccatatagtactgtagaacactagaagttattcctcctatctagctatacttttatatctgttaaccaacctctggctatgtctccctctcccctcccctctcccacctctattaaccactattctactctctacttctatgagacttcttttttttttttttttaaaggcagcaacttgctctgttgcccaggctggagtgcagtggtgtgctcacagctcactgcagcctcaacctcctgggttcaagtgatcctgccatctcagcccctcaaatagctggaaccacagatgtgcaccaccatgtccagctaattgtttttttggtagagacaagttgttgctgtgttacccaggctaaggttaacttttttagtctccacataagagtgagaacatggggtatttatctttctgtgttcagcttatttcacttaacgtaatatcctccaagctctaagacatctcttactagaggtcctggatagttcaattaggaaagaagaatatataaaaggacataaaggtttggaaggggagaagtaaaactatccttatttgcaaatcatatattaaaaaatcattattttaaagaaattattatttatatttatatatttttatatatatatatatatatatatatatatatatatatttttttttttttttttttttttttttttttttgagatagagtcttgctctgtcagccaggctggagtgcagtggcacgatctcgactcactgcaacctctgcctcccaggctcaagcaattctcctgcctcagcatcccgagtagctgggattacaggggtgtgccaccacaccccgctaatttttttttgtatttttagtagagatggggtttcaccatgttggccaggctggtcttgaactcctgacctcaggtaatccacctgcctcggcctcccaaagtgctgggattataggcgtgagccaccgtgccggtctctaaaaatatatatttaaaaattctgagctgggtgcggtggctcacatctataatcccagcactttgggaggccaaggcgtgtggatcacgaggtcagcagatcaagaccatcctggctaacatggtgaaaccccatctctactaaaaatacaaaaaattagccaggcgtggtggcgggcgcctgtagtcccagctacttgggaggctgaggcaggagaatggcgtgaacctgggaggtggagcttacagtgagccgagatcccgccactgcactccagcctgggcaacagagcaagactctgtctcaaaaaaaaaaaaaaaaaatcctaagggtaggccaggcatagtggctcacacctgtaatcccaacactctgggaggccgagttgggcagattgcttgagagcaggaggtcaagggtcaagacaggaggactgctttggagtgcaatggcactatcttggctcactgcatcctccgcctcccgggttcaagtgattatcgtgccttagcctcccaagtagctgggattacaggtatgcaccaccacacctggctaatttttgtactcttagtagagacggggttttgccgtgttggccaggctgtctcaaactcctggtctcaagttatctgctcgcctcagccttctaaagtgctgggattacaggcatgagctatcttgcctggcctcttttgcttttttaaaaatagagactagatcttactattttgcccaggctggtcttgaactcctggctggggttacaaatgtgagccacccacctggccaaatgccaaaatcttgtttctcatcaaacctgcaattatgggccttaatattgacgaattccaatggaattaaccacatgatgatggtttccaaatggcaattctctattgcagtcattctttctttgttagttggctgctataagagcttttttgtctcctcagtttatctatttattcacttatttcttcatttttattatattcagtggattgtaatccattcatattagttattttgatgctcaaattgtttttaatttggccagtgtgagctcttcagcttggtttctatgtccctttgacatgtcctcataatttatggagcatttcttaatttctggaacaggaagatattctaggcttctattttacttgccttgtctcagctctgcagttagccatttctctgtggacccctggttccttttcgtggaggatggtatttagagacgaaggtctagcattaaattcattgctcctgatgtggcagtgcttctaggccttttcagtagataaagttaggatactgtgtttgtctgttttgcattcccataaacgaatacctaagactcggtaatttatagagaaaaagaggtttatttggctcacagctctgtagattgtacaagcatggttgtacagcatcggcttggctgttagtgaggcctcagtaatcttcaactcatggcagaaggtgaagggagagcaggcctgtcacatggcgagagaagtggcaagagagaggaggaggtaccagcctcttttaaacaaccatctctcgggtgaactaatagatggagaagttactcattactgtgaggacagcaccaatccgttcatgagggatctgcccccatgaccccaaacacctaggcctgcctccaacattggaggttatatttctttctttttttttttttttgagacagaatctccctctcttgaccaggctggagtgcaatggcatgatctcgactcactgcaacttccgcctcctaggttaaagcaattctccctgcctcagcctcccgagtagctgggattacaggcgcctgccaccacagccagctaatttttgtatttttagtagagatggggtttcgccatgttggcctggctggtcttgaactcctgacctcaggtgatctgtccatctcagcctcccaaagtgctgggattacaggcatgagccactgcgcctggcctgtatttcaatatgaaatttggaggggacacacatccaaaccataccagctatatatgtatgtatatgtgtacacacaaacatttaaaactatttatatgtgtgtaatatatgtatatgcatgtaatatatatgtaatatatgatacattatatataatatgtatattttttattagtaccttgtacccctctccttaacacctaccttctgctatagagacatactaatttaactacaactttacccatcttcctccttcccgccaattaacagttaaaaaaaatacacttcttcttttctaaaaaagaaaagagatatctcatttagtatctatctggcttcatagcttattttcccttcatttcactcaaagaggaaaagaaaacagaaatacagaaaaagtttttgtagtctcttttgaattaccagcccaaatatctaattgcacagaatattgtgagtcttgttctttctacaggcaggctaggaaggacatataagctgtgacacaccatcttccactactccaacctcccattctccccacccttttgcctctgtcccactcctgccactgtagtcagcctccctatgatttgcaatctgaagataaactgggcaaaactgagacaataataaggaccctactcttcctcctgttacattgggaacaatattacatcagaagttcttgtattaactttttgaaatatgacagtgattttttttttttctgattgtttagcaagaaaacaaaagacaagagggaaaaaactcacctaccacccaaagatagcccctgttaacattttggtggatgtcctttaagtcacttttttctatacatatttatttttatttaatttcttaacatgggtagactttcatttttgtgatgagcaaaaaagaatttgatcagctaatattttaggtaattttattacctaaatgtattaaataaattttaaaaattaatatttgtcaatatcttatataaaatctaaaacaaaatttttatataattatatataaattatataattatattttatagataaagctaatatttaagcattttatattaattacctaatatatattttatatttaggtaaatttattacctaaaatactaatttattgaatttatttaatacattttattaaattaatttaaattttttttttttttttttttgagatggagtctccctctttcacccaggctggagtgaagtggcatgatctcggctccctgtaacctctgccccctgggtttaagccattctcctgcctcagcatcctgagtaggtgggattacaggcacccgccaccatgcccggctaatttttgtatttttagtagagatggcgtttcgtcatgttggccaggctggtctcaaactcctgacctcaggtgatccaccctcctcggcctcccaaagtgctgggattacaggcgtgagccaccatgccctgccaatttatttaatttttaaaaattaaatttaaaggtgtttcttctcttttctggtttttgttttgttttgttttgttttgttttttgttattttttgagacagtctcactctgttgcccagactggaaggctagatagagtacagtggcgcgatcctgactcactgcaacctctgctttccaggctcaagtgattctcgtgcctcagccacccaagtagcttggattacaggcatttgccaccacacctggctaatttttgtatttttagtagagatggggtttcaccacgttgaccaggctggtctggaaatccttgccttaagtgatccgcccacctctgcctctcaaagtacttatattacaggcatgagccaccatgcccagccctaaaaatgtttattttccagatagtttattcctttaaatgtttataaccttagcttttctttttcaaatcattttcttaaaagtcaagatacatctgaaaaatctcaggattgtgatgttcaatgtaaagcaaagcgtgacttcctaatgagtggtttgccagatttgttgaaacggcaaattgcaaagaaagctgctgcgctggatgtgtacaatgcagtgagtaccagtttccagagagtcgtacatgtgcaacaaaaggatgatggtaagtttgttttttattattgaatatttactcttcagctgttagcaggaacattaaactatgtaagtttcttaaagatgaggctgaagtttaattatcattcttatggtgactttagtgggaattttaaggacaatttctctcactatccatggggtttgattccaggacccccttgtggatactagcactcatggatgctcaagtttcttgtataaaatggtgtaggctgggtgtggtgtctcatgcctgtaatcccagaactttgagaggacaatgcaggagaagagcttgagcccaggagttcgagaccagcctgggcaacacagcaagatcctgtctctaaactagctaactaacttaattaattaattaattaaaatttgctgggcatgacggtgtatgcctgtagtcccagctactcgggaggctgaggtgggaggatcacttgagcctaggaggtcaaggctgcagtgagccatgatcatgccactgcattccagcctaggtgacagagcgagaccctgtctcaaaaaaagaaaaaaaaaaaaaagtttagcctttcttctgtacgtgggaatttcccagctagtcttttcagtaatttattctactttttcttatttcccatctctgccactggccattcagttgatgaaggctttcttgttatttttactagtacagctttatatagcattttccaatagtatgttcaactgtagaaattagttatgcttttcttgactcattttgataaactcattttcacaggagtgctgccataaaacttagcatatctatttgtagatgagcagagaggcaagcacagagggaacctctctctcttacaaccttcagaattattgaacgcttactattgtctggaattctgctgagcaattcatatacatatctagtttaatcctgataacaactctaagaggttgagtattataattatcaccctcactttgaatgtaaggatgaagaaactaagatttaggatctcgccagtgctcacaaggttagtaagtggcagaggttgggtttgaatccaggtctaacttgaaagtttagactttagaccaggttgctaactgcctcttaaaaggtttttgtttgtttgtttgtttgttttgacagagtcttgctttgttgcccaggctggagtgcagtgatgagatctcagctcactgcaacctctgtctcctgggttcaagcaattctcttgcctcagcctcctgagtagctgggattgctggtctcgaactcctgacctcaagtgatccacctgccttggcctcccaaagtgctggaattacaggcgtgagccaccacgcctggccctcctaaaagttttaacctgagtatcaaggttgatttgaaaagaaaggaaagtttgttaatatttgtttgttttaaacaactggaagggaagtctaggtgatttttattaattctatttgttggagggtaggattttgttccctttatagtcatgtggtttttggtatgtttgtgttaattatgtagttgtcaacttttcatgtttacgtatttgacattcagtaaatggatagtgtataaataaggtttattaagatatttgtctatttttctttagggtgttgtttgtggcatttgaaaccaccctcttgtcctctcttaactaaatttaaagaactgaacactaaagtaatagatctctcaaaatgtggtattgctcttggtgaattttcaacattgaattcaaagttgaaaagcggtaactctgctgctgtggtaagtattaaatagttcatccattgtagagtgtttcccttacatcttgcagaggaaaaacatttttggatatctactcttatagcctcgagtgttgtcctagagtttaattttttttttttttgagacagagtctccctctgttgcccaggctggagtgcagtggtgcaatcttggctcactgcaacctctgcttcccgagttcaagcaattctgcctcagcctcccgagtagctgggactacaggcacacaccaccatgcccggctaatttttgtatttttagtagagacggaatttctccatgttggtcaggctggtcttgaactccctacttcaggtgattcccccgcctcggcctcacaaagtgctggggttacaggcgtaagccactgtacccagcctaatatttaaaaataaatcctaattgtagtacacatttcttttaaatacccatagagctttaaaaacattttaagaattaatgattgccagttctcaaagaatgttagattacatagcacatttagatactttataagtaggtcatataatctaatagatataattagttcaaagggagaaaaataaattaattcttcataagctttatatttagtgactaaagctattttttttttttttttgagttggagtctcaccctgttgcccaggctggagtacagtggcacgatctcggctcactgcaacctctgcctcccgggttcaagcgatcctcctgcctcagctccccctagtagctggaattacaggcacacgccaccatgcccagcaaatttttgtatttttagtagacacggggttttgccatgttggctaggctggtctcaaactcctaacttcagatgatccacctgtctcttggcctcccaaagtgctgggaatataggcgtgagccaccacgcccggcctaaagctaatcttacgttgatactgatttatgatggacagaaagtggttggtagtattgtaattaacatgaatagatgatgttggtctgttattgtgcattttattctttattgcagttcatgaggacaaggaaggaatttactgaagaagtaagaaatcttttgcttgaggaaattaggtggtcaaatcctgaattttcattgaaaaaatattttcccttactcctaaaaaaacaaattgagcaccaagtactttcttccgagtgtcatagtaaacaaggttagtgataattattatcatttatgttaacataccagttttgggtttttatattatttattattttatttttatttctgagacggagttttgctcttgtcgccctggctggagtgcagtggcacaaacctggctcactgcaacctctgcttcctgggttcaagtgattctcctgcctcagcctcctgagtagctgggattacaggcacccaccatgacgccctgctaatttttgtatttttagtagagatggggtttcaccatgttggccaggctcgtcttgaactcttgatctcaggtgatccatctacctcagccccccaaaatgctgggattacaggcatgagccactgcgcttggcctattttttctttttttttagagtgttgctctgtcacccaggctggaatgcagtggtgcaactttgcctcactgcaaccttcgcctcccgggctcaagtgattcctgtgtctcagcctcctgagtagctgggaccacaggcttgcgccactgcacctagcttattttattttttaatttttacttattctcttgagactgggttatgagactggctagtttttgtatttttggtagagaccaggtcttgccatgttgcccaggctggtcttgaactcctgggctcaagtgatcctttcgccttagcttcccaaagtgctgggattacaggcatgagtcaccacgcccagcctaacgtgtcagttttgaaaaacactaagacttaaccaatgacacttggaagtgttcaccacagacaacattgcttacacttggcagggagaattgttcagctgaagtaaaagtatcttgtacaatgcaatgtgcaacattaatccccgccagtttccaaaaatgccaactcaaagatagctttaattatgttaaaatattatgtacttaaggaatgccttagataattttagcttatatagcttgtataaaagacagtctaagtattaaaatctccagcttgctttcagtatgttatatttgattcttgcctttttattttattttattttatttattttttgagacagagtcttgctctgacacccaggctgaagtgcagtggcgcgatctcagctcagtgcaacctctgcctcccagatttgagtgattctggtgtctcagcctgcctagtagctgagattgcaggcacctgccaccatgcctttctaatttttgtattttttagtagagatggggtttcaccatgttggtcaggctggtctcgacctcctgacctcaagtgattcactcgcctcagcctcccaaattgctgggattataggcatgagccaccatacctggcctatttatttattttttaagagacacggtctcactttgttgcccaggctagaatacagtttgtttgtttgtttatttatttttattttttgagacggcgtcttgctctgccgcccaggcagtggtgtgatctcggctcactgcagcctcagccttctaggttccaccgattctcctgcttctgcctcctaggtagctgagattacaggcacacgccaccatgcctggctaatttttgtatttttagtagagatggggtttcaacatgttggccaggctggtcttgaactcctgacctcaggtgatccacccaccttggcctcccaaagtgctgggattacaggtgtgagccaccgcgcctggcctatttatttattttttaagagacagggtctcactttgtcgcccaggctagagtacagtggtgttttcatggctccctgcagcctcgatctcccgggttcatgtgatcctcccacctcagcctcccaagtagctgggactacaggtgcatgccaccacccctggctgatttttgtatctttagtagagatggagtttccccatgttaccgaggctggtcttaaacgcgtagactcaagcaatccgctcacctcaacctcccaaagttctgggattagaggcctgagccactgcacctggattgcctttgcattttaaagttacaagactattggatacttggaagtgatattaatattactggtttttgttgattagtaagcacatgcacttctttaattcccaaagcagaactggaggctgatgtcagccataaagaaaccaaaaggaaactcgtagaagcagaaaattctaagtcaaaaagaaagaaaccaaatgagtattcaaaaaatctggagaagaccaataggaagtcagaagaacttagcaaaagaaacaactcttctgggataaagctagattcttccaaaggtatattttctaaaacatcccaaaagaaatagattgctttgaggacatgcaaagtggaaaccaaagcagtagaagattttgatatgctttttaaaaaattttaattcaattgtattttaattttagattttctttttcttttttgagacacagtttctctcttgtcacccaggctggagtgcaatggcacgatcttcgctcactgcaacgtccctccacctcctgggttcaggtgattctcctgcttcagcctcccgggtagctgggattacaggcacccacctgcacgcccagataatttttttttttttttgagatggagtcttgcacggtcgcccgggctggagcccaccatcatgcccagctaactttttgtatttttagtagagacggaattggccaggctggtctcgaactcctgaccgcattattcacccacctcggcctcccaaagtgctgggattacaggtgtgagccaccgtgcctggccacgcccaggtaatttttatatttttagtagagacagagttttaccatgttggccaggctggtctcaaactcctgacctcaggtgatccaccccccacccccctccccgcccttggcctcccaaagtgcagattttgatattctaatagatgatgacagtctgcaccagaaatattaacatcttccattcctggtaaattcgagtttttccttctagtcctagaactctttttgttttttaacttttcattctttctccttctctctcttttttttttcttttgctcattgcaactttcaaacaataaatatgtgtttgaaataaatagaacctcacggattatgggcttacaaatgaccatattaacagataggtgttcagtctttgatttttctgtgcttccataaatacatgtgcttttatttttttattttttattttttgagacagcatctctctccgtcgcttgcctgatctcagctcactgcaacctctgcctcccgggttcaagtgattctcctgcctcagcctcctcagtagctgggactacaggcgcacgccaccacgcccagctaaattttgtattttcagtagagacagggtttcactgtgtggtccgggcaggtcttgaactcctgacctcaaatgatctgcccactttggcctcccaaagtgctgggattacaggcatgagccactgcacccggccaatatatgtgctttaaaaaaaatctggtattgtgctcgctttggcagcacatatactaaaattggaatgatacagagaaaattagcatggccccttgtgcaaagatgacaattttttttttttttttggtatttttagtagagatggggtttcgccatgttggccaggctggcctcaaactgacctcaagtgaagggatgacaattttaaaattaaaaagtaaaaaaaaaagtaacacagtgtccgggcatagtggctcataactgtaatcccagcactttgggaggccgaggtgggtggatcacctgcagtcaggagtttgagaccagcctgccaacatggcaaaaccctgtctctactaaaaatacaaaaattaaccaggtgtggtggtgcgtgcctgtaatcccagctacttgggaggccgaggcaggagaatcgcttgaacctgggaggcggaggctgcagtgagccaagatctcgccactgcactccagcccaggagacagagcaagactccgtctagggggcaaaaaaaaaggtaacaaagttgaaaaaaaaatatggtcttatcccatacatactattttacaccatgttttacatatctctgacatgttctcattcagtttatttatttactttttttgagacagttttgctctttttgcttaggctgcagtgccatggcatgatcttggctcattgttgcaacctctgcctcccggattcaagcgattctcctgcctcagcctcccgagtaactgggattataggcatgtgccaccacgcccggctaattctgtatttttagtagagactgggtttctccatgttggtcaggctggttttgaactcccaacctcaggttatccacccgccttggcctcccaaagtgctgggattacaggcatgagccaccgtgcccagccccattcagtatatatagcttttccaaagtatgctattgatttattcatttatatagctttatacaggatgaatatccctaatccaaaaatctgaaatttgaaatgctccaaaatccaaaacattttgagtgctgacatggtgccctaagtggaaaattccatacctggggccaggcaccatggctcatccctataatcccagcactttgagaggccgaggtgggagcattgcttgagcctaggagtttgaggccaggctgagcaacacagggagaccacacctttaccaaaaaaaaaagaaaaaaaaattggctaggcatggtggcacatgcctgtagtctcagctccacaggaggctgatgtgagaggatcacttgaggttaaggctgcagtgagccatgattgcaccactactccaggctgggtaacagagcaagaccctgtctcaagaaaaaaagaaaattccacatctaacctctggtcatagtcaaaatgcccaggctggactgtggtagcatgatctggactcactgcagcctccacctcctgagttcaagcgattcttctgcctcagcctcctgagtagctgggattacaggagcccaccaccatgctcggctactttatgtattttttttttttttgagacagagtctcactctgttgcccatgctggagtgcagtggcgcgatctcggctcactgcaagctccgcctcctgggttcgtaccatcctcctgcctcagcttcctgagtagctgggactacaggtacatgctgccacgcctggctaattttttgtatttttagtagagatggggtttcaccgtgttagccaggatggtcttgatctcctgaccttgtgatccaccctcctcagcctccgaaaatgctgggattacaggcgtgagccaccgcgtccggcttttttttttttttttttgagacaaagtctcgctctgtcacccaggttggagtgtagtggcacaatctcggctcactgcaacctccacctcccaggttcaagctattctcctgcctcagcctctttagtagctgggactacaggcgtgtgccaccacgcctggctaatttttatatttttagtagtgacggggtttcaccgtgttggccaggctggtctcgaactcctgacctcaagtgatcctcccacctcggcctcccaaagtgctgggattacagatgtgaaccaccgagcccggcctactttttgtatttttagtagagatggggtttcaccatgttggccaggctggtctcgaactcctgatctcaagtgatctgcccgcctcggcctcccaaagtgctgggattacaggcatgagccactgcacccatcccgattattggttttatgccacaaattatttctcatcattcatgtttcttcagtggttattaaaaatttaaatattgctgtttgtggtggctcacatctgtagtcccacctactcaggaggctgaggtgggagcttgagtctggaagttcaggaatgcagggagctgtgtttgtgcttgtgaatagccactgcagtccagcctgggcagcatagcaagacctcatctcttaaaaaaagaaaaaaactatttatttttaattttcaactcaaggggcacatatgcaggtttgttacatggatacattccatgatgctgagatttggacttcaattgaacctgtcacccaaatagtgaacatactgcccaatagatagtttttcaacccttgtcctcacttcttccctcctcccttttgtagtccccagtgtcttttttgttgttgttaagagacagggtcacactatgttgcccaggccaatcccgatctcttgggttcaagtgatctacctgccttggccttccaaagtgctgggattataagtgtgagccaccacatgtggcctccagtgtcttttgttcccatctttatgtccatgtgtacccagtgtttaggttcagcttataaaggagaacatgcattatttggttttctgtttctgcatttattcacttaggataatagcctccagctgcaaccatgttgctgcaaaggatatgatttttttcttttttatggctgcatactatcccatggtgtatatatgtcctacaaattctttatccaatccaccatttttgggcacttaggttgattccatttttgctttttttttttttgagatggactgtcactctgttgctcaggctggagtgcagtggcacaatcctggctcactgcaacctccgtctcccaggttcagtctctttgctgttctaaatataaacatgtgagtacatgtgtctttttggtagaacagtttattttcctttgggtatatacccagtaatgtgattgctgggccagatggtaatcctaaaaaaaaaaaaaccaatgtttaagtgtgcactttaatttttttttttttttttgagacggagtctcgctctgtcgcccaggctagagtgcagtggcgcgatctccgctcattgcaagctccgcctcccgggttcacaccattctcctgcctcagcctcccgagtagctgggactacaggcccccgccaccacgcccggctaattttttgtacttttagtagagacggggtttcaccgtgttagccaggatggtatcgatctcctgacctcgtgatccgcccacctcagcctcccaaagtgctgggattacaggcgtgaaccaccgcgcctggctaacactttaatattttaataagattatggtggttatttttttttagggggaagggtttggtgtgaagaattttaaatgtaatgttgttttaaaagtacctctggcattttgtaaatataaatatttctgcaaatacctactgtgacattgtaacaataatgtaaatgactaataattcatatatgtttatgtcaaggaatgaataccttaattttttttttttttgctttagattctggaactgaagacatgctttggacagaaaagtatcaacctcagactgccagtgaacttataggaaatgagttagctataaaaaagttacataggttggtaaaatgtgtaaggaattgagaaatagtttacaaacttagttttactgtttttgtttcgaaattgtagttacaaagtaatatatctcatgataaaatcttcaaaaaactggtagaagtttaagtgaaaagtagccctcttttcttacatttctacttctcagagataatcattgaaaattttttgtaaaagcttccagaaaaatatttttatgcatatgttagttccttcctttctaacaaatgggatcacattactactaattcaggtccccagtccttcatcttcaattctcacatccaaaaaattctgaataatgaaagtttattgactttattacatgaaatttgttacacctttacacttagtagaatttacaaatttttttttttttttttttttttttttttcaagacagagtctcactctgttgcctaggctggagtgtaatggcacgatcttggctcactacagtcgctgcctcccaggttcaacagattctcctgcctcagcctcctgagtagctgggactacaggggtgcaccgccatgccaggctaatttttgtatttttggtagagacagtttcgccatgttggccaggctggtctcaaactcctgacctcaggtggtccacccgccttggcctcctaaagtgctgggattacaggtgtgagccactgcacttggccagaattcatatattttttaataaaaatattaagtgatggcccagtgcagtggctcacacctgtaatcccagcactttgggaagctgaggcgggcagatcacttgaggctgggagttcgagaccagcctggccaacatggtgaaaccccatctctactaaaaatacaaaaattagctgggtgtggtgatgcacgcctgtaatcctggctactggagaggctgaggcatgagaatcgcctgaacccgggaggtgaggattgcagcgagccgaggtcgtgccagtgcactccagcctgggcaacagagtaagactctgtcccaaaacaaagcaaaaaaacaaaccaaaccaacttaaatgattatgggtgtactgcctagaccccattaggggtattatgtaatatgcagtatatgtaccaaataaccttttaagtatctgaaaaattaattctaaaacaatctggtccaaaggatttcatataaggatttacggacccataattacagttaatagcgtgaacttggtactactgttctaagtacttgtattgttccttctttcttttttttttttttacttgtactgttcttaattcattttatccttagaatggtactgtgagcagtgggtacagtggctcaagcctgtaatcccagtgctttcgtaagctgaggcagaaggactgcttgtggccaggagtttgagagcagcctgggtgaaatagggagaccccatctctacaaaaaataaaaaaaatagctgggaatgatggcgcccacttggattctgagccactcaggagcctgaggtgggagggtcacatgagtccaaggattcgaggctgcagtgagctatgatcgcacccctacactccagtgacaaagcaagactgtctcaaaaaaagaaaaatactatgagcataaatactgttgtcctcatctcatagatgaagaaaccaaggcctagagaggctgagttatttgtccaaagtcacacagctagaaagtgatggaactgggatttaaactcaggcattctagctctagactagaacttaatctttctgttgtacattgtatattaggcatctttcatggaattacacaacataccgcagttctttttttttattttgaaacagggtcttgctctgttgcccaggctggagtgcagtggttgaatcttggctcactgcaaccttcgcctctcaggctcaagccatcctcccacctgagcctcccaagtcgctgggactacaggtgtgcaccaacatgcctggctaatgttttttgtagagacaggtttcgctgtgttgcccaggctggttgcaaattcctgggctgaagcaattcacctgcctccgccttccaaagtgctgggattacaggcctgagccactgtgcctgccctgccacctcagttctttttaattgctgtataccagtttctaagtgagtgtactataatgtatttttcccaatggtgtatttttatgtttttcctgttagaggctaatatgaacaatgctacagtgaatattcttacacatatagtcttgtatattttggcagaaactacttcatttaaaaatgttcatgtccatgtaaaactattttactctttagttgattcacaagcactgtggagtgtttagaaactaacaatatgccatataaagctgtactagtaaaaataacaagaaagccttcatcagttgaatggccagtggcagagaaactaacaatatgccataacttcccccgataatcattttaacataaagtctaaggcatagctatattctgtgaattatttttattatgttttcttgtggcagttggttgaaagactggaaaagaagagctgaattggaagaaaggcagaatctgaagggaaaaagagatgagaaacatgaaggtattttgtgtgtctttttttttttttttaccatttcactgaacatttttagagttacattaactaaaactttctataaaatttcttttttttttaatttttttttttttttggagacagagtcttgctctgtttcccatagtggagtgcagtggcgcaatctcggctcactgctacctccgcctcccgggtcaagtgattctcatgcctcagcctcctgagtagctgggattacaggcgcctgccgccacgcccgactaatttttgtatttttagtagagatggggtttcaccatcttggccaggctggtcttgaactcctgacctcgtgatccacccaccttggcctcccaaagtgctgggattaagcagtggcatgagccactgcacctggcctataaaatttcttaattggtattttatatttgattttctactttttttttttttttttcactctgtcacccaggctggagtgcaatggtgtgatctcggctaactgcaacctccacctcctgggttcaagtgattctcccatctcagcctaccgagtacctgggactacaggcatgtgtcaccacacctggctaatttttgtatttttagtagagatggggtttggccaggctggtctcgaactcctgaccttgtgatctgcccgcctcagcttcccaaagtgctgggattacaggcatgtgccactgcgtccggcctgtataaagtaatttttcagcatctattgcaagaagtttgtgggatttgatcactgggtttcataaggtagaattgcttcctcagcaattgtcattttatatgcatttgaataatttttcagatttctcgggtggcatagactttaaaggcagttcagatgatgaagaagagagtcgtctttgcaatactgtccttataacagggccaacaggagtgggaaaaactgctgcagtgtatgcttgtgcccaggagcttggatttaaggttagtaacagctatgatgagagaatgttaatgtaataattacccttggattaaaaggaaacataaaccattctcccttcgttttttcttatattcttcttttagatatttgaagtgaatgcctcttcccagcgcagtggtagacaaattctatctcagttgaaggaagctactcagtcccatcaagtagacaaacaaggtgtaaactcacaaaaaccctgtttttttaatagctactacataggcaagtcaccaagtaagtaaactattttccttaagccataatgttttgaaaaaaataaaatctaagaaagtaatgttaattatcagcattttgccatttattttttatcttctacacgtacacgtttcctgcccacccctgccagattattttaaaacaaatctgaagaccatcatatcatttcacccataccttcttcaatatttatctctatctgataaggacttttaaaaaagcataactataatatcgtaatcagacccaacagagttaacaaccagcctaagcagcatagcgagaccttgtctctacaaataataaaaaaaaaaagtagctaggtgtggtggtgtatgcctgtagtcccagctactctggaagttgatgtgggaggttcacttgagcctagaaggttgaggctgcagtgagctgtgattgggccactgcactccagcctgggtgacagagtgagatcccatctccaaaaaaaaagatctattaactatatttcttcatataatctcatacacagtctaatgtcaattttctgttgtttcaaatgatttgttcaaatctggatccaaacaaggttcatatcttacatttgattcagttctcttaactttcttttaatctcgctaacaattcactcacctttcttttcatgtcattaatttgttgaagaatctgagtcatttgtcatgaaattcttcacattctggatttgtctgctgattatatcctcatggtgtcagttagtatagtcctcttccctatatttcttgtaaactggcagttagatctatgggccttattagattcaggttctgttctgggtctggcatacatatacaggtggcctgtgtacttcctatgacatcatagcagattatcccttgtagattacaaaatgataattttataattctcttttttgcatttattagaattttaaaaggaagcactattcctcatcaactctttggatgctttggaatacagtttataggcaccagaaatgcttcattcattcctttatttattagtacttagagtgatggtgtcctagcaaccttgacagttgaccagtgagtttttgtgtagtttaattttttaagtattattatgaactcatggatttttatatatataatatgtttcacctctttgtgtttattatttctttgttgctttggagattttctcactggttttaagtaatttgattatgatgtgccttggtgtacttctcttcatgtttcttgtgcttgggatttgttgagtttcttgcatatatgagtttatagttgggaagatcaaagttgataaaatttcaaccagtatttcttaaaatattttttctgtcctccccttttcctttggcaactccagttattattataggtattttagaccacttgaaattgtctcctggcacactgatgctttgttcaatttttcagtctttttcctctttttgtttcagtttggttagttgttattactattcaagtttacacatcttttctgtagtatctagtatgctgtcactgctataagtatagttttcatttctagaagtttgatttgggtcctttttatatcttctgtgtttctacttaccatgtgcccagtctttcctgtaggtttttgaacatatggaatacagttataacaactgttttaatggtcttggttattaattctatcatctgtgtaatttttgtttttttgaaacggagtctcgcacttgtcgcccaggctggagtgcagtggcacaatcttggctcgctgcaacctccacctcccaggttcaagcaattctcctgcctcagcctcccgagtagctgggattataggcaaccgccaccacgcccagctaatgtttttgtatttttaatagagacagggtttgaccatattggccaggctggtctcaaactcctgacctcaggtgatccaccccccatggcctcccaaagtgctgagattacaggcatcagccaccacgcctggcccatctgtgtcatttctgagttgttttttcaattgattgattattccctctttcattatggattgtatttttctgattctttggatgcctgataattctgattgcatgtcagactttgtagagtttgccttcttgggtgctggatatttatgtattcctgactgttcttttttttctaaatttatcaatcctgcactttttgtacctataactgttcgttaactttcttctgtgatgtggttaagttagttgggaaaagtttatcttcaggtcttgtgtatgtgtttgtttttgagacagtctcaatctgttgccaaggctggagtggagtggcacgattatggttccctgccacctcgaagtgggcttgggcaatcccccaaccttagccttttgagtagctaggactacagaccaccgcactcagctaattaaaagaaatttttttttgtagagggggtcttgctgtgttgtcaggctagtctcaaactcctggcctccagcagtcttcctgccttggcctcccgtagtgctaggattacaagtgtgagccgtcaccacgcccagctttttcaggtcttttaaactgtagtaggcaaaaaagtagcagcatttagtctagggctaattttgccccactccttaggcaaaacctttctgagtgcttcaatattccattagttatgtttgccagtctacctgatgggaagacgaatcattcacagctctctgtgagcctcagagattgtttcctctgatctttcactgatgagtactcaattttagacttgagagggactctgcaaatttccagagctttgcccagctgtttcttctgtattcttccccacatctctgtctgcttggcctcctcaggtttctttttctttttttttttcttttttctttttttttttctttttttgagacggagtctcacactgttgcctgggctagagtgcagtggtgcgatcttggtgcactgcaagctctgcctcccaggttcaagtgatcttcctgcctcagcctcttaagtagctgggattacaggcgctcgccatcacgcacagctaatttttttgtatttttagtagagacagggtttcactatgttggccaggctggtctcaaattcctgaccttgtgatctgcccgcctcggtctcccagagtgctgggattacaggcatgagctactgcacccagccaacctcctcaggtttctagtgcagtctcaactcagaaaacatggattgactttcccctcactatggaaattttctcagggcaataggctgggcaatcctagtgttcaccttatttgtttttatatctcagagattactgtccattgttgcatcatgacaaaagtcttgaaaagtgttatttcatatattatgtccagttttcttgttcttatttatgatgggaggataaatccagtgccagttctataccttgactagaagcagaatcccatcttattttcttttggtgctcatatttttccatctttgactagcaaggaactattttaattggtttgtgtccttttgacattaccccagcaatagttgatattttacttgctttctggcatgtcaggatgtcccagacctacagttagctgtttctgcaagaaggtagttcttttggtgtgaaatttctttttcttttttttttttttttgagacggagtcttgctctgtcacgaggctggagtgcagtggtgtgatcttggctcactgcaacctccgtctcccaggttcaagtgattctcatgcctcagcctcctgagtagctgagactacaggtgtgcgccaccatgcctggctaatatttgtgtttttagtagagacacggtttcaccatgttggctaggctggtctcgaactcctaacctcaggtgatccatctgccttggattcttgaagtgctgggattacaggcgtgagccactgtgcctggccaatttttttagaaagaatatattgatatagtttagccagctactcacagagtatcttaaaataaaaattgcctttttttttttttttttgaaaagacggggtcttcctctgttgccaaggttggattgcagtgatgcaatcatagctcattgcaaacttgaactcctgggctcagatgatcctcctgctttagcctcccagagtgctgggattgcaggtatgtgccactgcacttggctaagcatgtatttttaaaaccagtctttgggccgggtacagtgggtcatgcctgtaatcccagcactatgggaggctgaggcaggtggatcacaaggtcaggagttcaagaccagcctggccaacatggtgaaatgccatctctactaaaaatagaaaaattagccaggtgtggtggtgcacacctgtaatcccagctacttgggagactgaggcaggagaattgcttgaacttgggaggtggaggttacagtgagctgagattgtgccactgcactccagcctgggcgacagtgtgagactccgtctcagaaaaaataaataaataaaaccagtctttggactggtattcatacatgatcaagcagtccttggtctatatcaaaataagaaaaataaggacaaaggccaggcacggtggctcatgcctgtaatcccagcactttgggaggctgaggtgggcggatcacgaggtcaggagattgagaccatcctggccaatatgttgaaatcccgtctctactaaaaatacaaaaattagctgggcatggtggcgtgtgcttgtaatcccagctactcgggaggctgaggcaggagaattacttgaacccggaaggcagaggttgcagtgagctgagattgtgtcactgcactccagcctggtgacagagtgagactccatctcaaaagaaacaaaaaaaaaaaaaaaaagaggaaaaaatggtgttttttataaattgatatctgttcaactatttatttatttatttatttatttatttatttatttatttgagatggagtcttggtctgtcgcccaggcagcagtgcagtggagcgatctcagctcactgcaacctccacctcccaggttcaagtgattctcctgcctcagcctcccgagtagctgggattacaggcacctgccaccatccccagctaatttttgtatttttagtagagacacggtttcaccatgttggccaggctggtctcaaacttctgaccttgtgatctgcctgccttggccccccaaagtgctgagattacaggcgtgagccactgtgccctgccaaatatttttatattttaagatattgcatctcttacctgtggtgttgaaatgttctatatttttgaaatgatggtcatgtctgtgacagcttttttaacctcgagattttcagtaagcttattgaacacctctaatatacaagggctatgataagatctatggagatagagggtagaaaaaaagaataggacacagatatggaactgtgatcatgagatggtatgtgaggaagatcctgttctgaggccatacagtaattaggatttgtaaggactaaatccaggtacctagaggggaagagaggatgtattatgtggaaaaatgccatggggcttttggagaatagaggtgaactatttattttttaacttcgtatctatcttccaaagcatctctaaaaatacattttattggcttgcaatattaatttactgcaggtctaaattaaagttgaacaacaaagttctgtaatgtgctcagtgtatactgttattttccctccaccctcttctttctttaagcaggtgtagaaaaaaatgaacagaggtactgtgaacagtatttgttgtaagaatgtgtatttctggctgggtacaggggcccacgcttgtaatcctagcactttaggaggctgaggcaggcggatcgcttgagctcaggagtttgagaccagcctggacaacatggcaaaacccatctctactaaaaatacaaacgattagccaggcgtggtggtgtgctcctgtagtcccagctacttggggggctgggcaggaggatcacttgagcctgggaggtggaaactgcagtgagctgagatcataccacttcactccagcctgggtgacaaagtgagaccctgactcaaaaaaaaaaaaaaatgtgtgtttctttggagtagagtgtcttttctaaatgactggcttggccgtgtgcggtggctcatgcctgtaatccgagcactttgggaggccgaggcgggtagatcacgaggtcaggagatcgagaccatcctggctaacacggtgaaaccccgtctctactaaatatacaaaaaattagctgggcgtggtggcgagtgcctgtagtcccagctactcgggaggctgaggcaggagaatggcgtgaacccaggaggtggagcttgtagtgagccgagatcatgccactgcactccagcctgggcgacggagcgagaccctgtctcaaaaaaataaaataaaataaaataaaataaataaatgactggcttaaccttctgtactggtagaataaataaatatagtaatatttggatgtacatagtatttttaagaatgaaagaaaatttctgtgtctttgatttttaactgttaagagtagaaatacagaatgtggctaactgtcttgctacctgtatgatttttagaatatttatctttaagtgcaatttgtttttgggcagaaaaaataagctcccctaagaaagttgttacatcaccaagaaaagttcctccaccatcaccaaaaagtagtggaccaaagcgagcacttcctcccaaaaccttggcaaattattttaaagtatctcccaaacctaaaaataatgaagaaataggaatgcttctggaaaataataaaggtaagacattaaattgacaaattttatattttttaataataatgacccttatacctaaaaatgtgagcacattttacgagttcctgttgctatttattaaatctcagctacactgaaggttctacatgtagaagtgttaatattttgtttccttttttttttttttttttttttttttttgagacagagtcttgctctattgccaggccaagctggagtgcagtggcacaattttggctcactgcaacctcttcctcctgggttcaagcaattcttctgcctcagcctcccgagtagctgggattactggtgcacaccaccactcccagctaatttttgtatttttagtagagacggggttttgccatattgttcagactggttttgaactcctgacctcaagtgatccacccaccttagcatcccaaagtgctgggattacagatatgagccaccacgcccagcttgtttcagtttttgtttgtttgagacagtctcactctttcatccaggctggaatgcagtggcgcaatcttggctcactgcaacctccgcctcctgggttcaagtgatgctcctgcctcagcctcccgtgtagctgagattacaggtgtgtgccaccacacccagctaatttttgtatttttagtagagttgggatttcgccatgttggtctcgaaaccctgacctcaggtgatccacttgcctcggcctcccaaagtgctgggattacaggcatgagccaccgcgcccgtcctgtttcagttttgataatggatttcagtttgagcttattctgtggacatatccaatgtcttagcaaaagttgattttacctaaaatattaatattgtatttatgcaggaataaaaaattcttttgaacagaaacaaattactcagactaaatctacaaatgcaactaattcaaatgtcaaagacgttggagctgaagaacccagcagaaaaaatgcaacatctcttattctttttgaggaggtaggcttatagaagtatacatttgtgagagctcatgataaagacttactttaaagaatactgtatgttttcttataaagaattgtaaaatagctaaggaggtcaggaatacgtgtatctatttgaaattaaagcaaattaaactgtccactctagaataatttttcaggaagatgattaatgtaattcacggctgctaattattgttaaatgattgtataaattattctgatccatatctgtctagttataggtggctgcgtttgtttttaacatttgatagttgataattttaaaattcattatagtgtatgacataaactttcaacatgagctgaattcacacttcataaattcataaattttgtctctaacagacatagaatatttactatgtatacataactgatattagtaagtgtattaatatattaatattctaataaactgtaggttgatgtaatttttgatgaagatgctgggtttttgaatgcaatcaaaacattcatggcaacaactaaacgacctgtaatccttactacaagtggtaggtaacaatgattttacttcagttaaacagttactcaaatctgtagttcatctgcagactggagtaattataattaactcacaaatagcaattacttttttaaaattgatactactttgggttactatgttgggtattagatatttaggaattggagaacaatctctagaatgcaaataagaaatctagtaatggtattttggtagggaaaatactagattcttctcctggtgtccttatcatacctataatcagatcactaaatctgatttagtggtcaggattttttatggaacccaacctttctgctgttccttaatcctgaacttagccactcttttgcccctgataacactttcttatgaattattgtatatttagctatcatcagcctaatagaattgatccatcttctaaagaattatcacagaatgtttcattttaaaaactcattcaatttctttttcaaaaaattggaaatactataataattttctaatatttttccaattataaatattcatgaggctagtctctacttacaaattaatgcccatttggtagtgattgtactcttaaaatattgagaaaaatcttattaatcagaagttaggtggtgttttttttttttttttttttttttttttttggagacagagtctcactctgttgcccaggctggagtgcaatggtaccatcttggctcactgcaacctctgcctcctgagttcaagtgattctcctgtctcagcctcctgagtagctgggactacaggcacacaccaccacgcccagctaatttttgtatttttagtagagacagggtttcaccatattggtcaggctggtctcgaactcctgacctcatgtgatccacctgcctcggcctcccaaagtgctgggatcataggcatgaggcactgtgcccagctggtagttttattagaagatcatagttggccaggtgtggtggctcatgcctttaattccagcactttgggaggctaaggtgggcacttgaacctgggagttttgagatcagcctgggcactatagtgagacccccatctctacaaaaaaacttaaaaattatctgggcatggcagcttgagcttataatcctagctgcttgggaagctgaggcagaggatcacttgagcccaggagtttgaggctgcagtgagctatgactgcaccacagcactaggcagtggtggggaggcgggtgctgaatattttcatagaaaagtataacttgaaaaagttatttattggtcttagtgtttaagaattttttttttttgtgtgtgtgtgtgtgtgtagacccaacatttagtttaatgtttgatggctgctttgaagaaatcaagttcagtactccttccctggtaagttttaaattttgatagccacaaattacatatcaccatcatgtaaaagtagtttattattaaatacagctataatttttttttttttttgagacggagtcttgctctgtcgcccaggctggagtgcagtggcgcgatcttggctcactgcaagctccgcttcccgggttcacgccattctcctgcctcagcctccgaagtagctgggactacaggcgcctgccaccacgcccggctaattttttgtatttttagtagagacggagtttcaccattttagccaggatggtcttgatttcctgaccttgtgatctgcccgcctcggcctcccaaagtgctgggattacaggcgtgagccactgcgcccggtccaatacagctataatttagccaggtgtggtatcacgcctgtactcccagctacttgggaggctgaggcaggaagatcacttgagcccaggaggtggaggttacagtgagctgaaattgtgccactgtactctagcctggtcaatcaatcaatcaataaggccaggcacagttgctcatgcctgtaatcccagcactttgggaggctgaggagggcagattgcttgagctctggagttcgagactagcttgggcaacatggcaaaaccctgtctctacacaaaaatacaaaaaattagccaggtgtggtggcacatgcctgtagtcctacctactcaggaggctgaggtgggacaattgcttgagcccaggaggtcgaggccatggctgcagtgagctgtgattgtaccactgcattccagcctgggtgacagagcaagattctgtctcaaaaaaaataaatacctggccgggcgtagtggctcacgcctgtaatcccagcactttgggaggccaggtagggtgggtcacctgaggtcgggagtttgagaccagcctgaccaacatggtaaaaccccatctctattaaaaatacaaaattagctgggcgtggtggcgcatgcctgtaatcccagctacttgggaggctgtggcaggagaatcgcttgaatttgggagatggaggttgtggtgagcctagatcgtgctattgcactccagcctgggcaacaagagtgaaactacatctcaaaaaaaaaaaaaaagaaaaaagagctataatttaaatgtggtttctaaggaatatgttaaaatttttaagttttaggaaacttctgattatttctcttttttttgctttaaaaatgtgttttcttaaatttaaaataatttttactaggcttcaatgttcactaggttttttgcctagtaaaagtgcttttctgaggtaaaatttaaatggagttaaaatgcccttacatgaataacttaatgaatatattttgtacatataacatatgtaaaaatcagtgtcatcattatgcagatcagaatatagagcatttccattacctcctaaagttctcatggaccctttctagtaagaatccccttttccaccagaaatagccaccttttttttttcttacgatgatgaacaaggcacttttttaacctttaaaaagatagtgtttttgtgtatatgtctttttttcttattttttcctttttcttttttttcattcttctaaaaaaaaaaagtttttaaaattaacattgagttgctgggcatggtggctcatacttgtaatcccagcactttgggaggctgaggttagaggattgcttgaggccaacagttccaggctgcagtgagataattgtggtcaggtcaattttactgtatgggttattttatttttttaggtgaggtctcactctgttacccaagctggagtgtagtggcacaattgtcctgttgcccaggctggagtacggtggcacgatcttggttcactacaacctccaactcctgggttcaagcaattctcccacctcagcctccctagtaattgggattggagacgcacaccaccacgcctggcttattttttttgtatttttagtagagacgggatttcgccatgttggccaggctggctttgaactcttgacctcaagtaatccacccaccttggcctcttaaagagctgggattacaggcgtgagccaccgcgcccgaccctgttcttacttttaaattgtgtttcttagctggaggcagtggctcacacctgtaatcccagcactttgggaggcagaggcaggcggatcacttgagtccaggagtttgagaccagcctgggaaatgtggtgaaaccctgtctctacaaaaaattaaaaaaattagctggatgtggtagcgcacacctgtagtcccagctacttgggagattgaggtgggaggatcacttgagtatgggaggcagaggttgcagtgagccaagatcataccactgcactccagcttggtgacagagcaagaccctgtcccccccccaaaaaaataattgtttcttttaaataacacataattgaatatttttaaaaatttgtctaggccgggcgcagtggctcacgcctgtaatcccagcactttgggaggctgaggtgggcggatcacctgaggtcaggagtttgagatgagcctcaacattgagaaaccccgtgtctactaaaaatacaaaattagctgggcgtggtggtgcatgcctgtaatcccagctactcgggaggctgaggcaggagaattgctcgaacctgggaggcagaggttgtggtgagccaagatcgcgccattgcactccagcctgggcaacaagagcgaaactccatctgaaaaaaaaaaaaattgtctaaacaggctgggggctgtggcttatgcctataatcctagcacttttggaggccaaggtgggtggatcccttgagcccagaagttcaagaccagcctgggcaacattggcgaaatcctgtctctacaaaaagcacaaaaattagctggatgtaaaaagaaaaaaaattaactgggtgcagtggcatgtgcctgtagtcccagctacttgggaggctaaggcaagaggattgcttgagcctgggaggcagaggttgcaggaagccaagattgtgccacagcactccagcttgggcaacagagtgagactctggaagaaaaagaaaaaaaaaacaatttgtctagacaattcttcattcttccttttctgcagtcttttggattaaccaagtatattatttcatttcaccttcactgttggctttcagctatatgctaatatggtctccactacccaaatgaagctattgagcttttaaaatgtggctagtctacagttaataaaagatcacattttgtatgataataattgtatgaaatgtccagaataggcacatttatagagacagaaagtggattcatagctgcctaaggctagaggagctaggtagaaatagggagtgactgctgattggtctggggtttcttttggggatgatgaaaatgctctgtaattagatagtggtaatgggtgcaaaactctataaatatactaaaaccattgaattttacatgttaagtgggtgaattgtatagtatatgaattatatctaaatacggcttattatctatttttaaaatgtggctagaccccatctctactttgtgctaaagtgtaatataaacaccagattttttttttttttttttgagatacggtctcactctatctcctaggctggagtgtagtggctcagtctcagctcactgcaacctctacctcctgggctcaagcagtcctcccctctcagcctcctgagtagctaggaccataggcatgtgccaccacgcccagctaattaaaaaaatttttttgtagagatgaggtctcactatattgcccagactggtcctgaattcctgagctcaagtaatactcctgcctcagcctcccgaagtgctggtattacatgcgtgagccacagtgcctggctaacaccagattttgaggactcagtgcaaaaaataggaatgtaacacatctcactaatttttatattggttacattttgcaatatttggatatattgttgtaaaagaaatgtagtaaaattaattattattattttttgagatggagtctcgctctgttgcccaggctggagtgcactggcgcaatcactggctcactgcaagctccacctcccaggttcatgctattctcctgcctcagcctcccgagtagctgggactacaggcgcctgccaccatgcccggctaatattttttgtattttttagtagagatggggtttcaccatgttagccagaatggtttcgatctcctgacctcgtgatccgcccgtctcggcctcccaaagtgctgggattagaggtgtgagcccccgcatctggccctaaaattaattttacttgtttctttaattttttaatgtgactcctagacaatttaaattacatatatggcttggtttttaaaatttttgtattaaaaaatttgcttttggtaaagaacacgtaacagtgtacagttgaatagtgttaagtatattcacattgctcttgcaaaactgaaattctacgcttgttaaatgaaactccctgtttcctcctgtccagtagttgctggcaactaccattctactttgtttatatgaatttgactatgctagatataaatggaatcatactgatttggcttgttgtgaccggcttttttttttttgagatggagtctccctctgttgccaggctggagtgcagtggcacgatcttagtcatgcaacctctgcctttggtttcaagcaattctcctgcctcagcctcccaaagtgctgggattacaggcatgagccatcgcgccaggctgtgactggcttatttcacttagcataacatcctcaaggttcatctaagtcgtagtatgtatatagcttacagtgttttacttgcattatatttcttttcttttcttttttttttttttttttttttgagatgtagtcttgctctgtcacctgggctggagtgcagtggcacgatctcagctcactgcaacctctgcctcccggtttcaagcaattctcttgcctcagcctcccgagtagctgggactacaggcacgtgccaccatgccctgctaatttttgtatttttagtagatatggggtttcaccatgttggccaggcttgtctcgaactcctgacctcaagtgatctgcccgcctcggcctcccaaaatgctgggattacagacgtgagccaccgcacctgcccctttccttatatttctttttcttttttttttttttttgagacagagtcttgctgtgtcgcccaggctggagtgcagtggtgcaatctcggctcactgcaagctccgcctcctgggttcacgccattctcctgcctcagcctcccgagtagctgggactacaggcgcccaccaccacgcctggctaattttttgtatttttagtagagacggggtttcactgtgttagccaggatggtctggatctcctgaccttgtgatccacccgcctttgcctcccagagtgctgggattacaggcgtgagccaccgtgcccagctgcctttgccttatatttctaatggacagtactgctgtagattctagatgttcttttcctttgtcgttgctaaattctcttattagttatagtagttattttgttggtttcttaggtttttctttgctttttttctattttttaaatttttattagaaacagggtctctctgtcacctaggttggagggcagtggtgtgatcataactcactgtaacttcaaactcctagcttcaggtgatcccccaaccttggcctcccaaagtgctgggattacaagcatgagccaccacaactgtcagtttcttaggtttttctgtgtactcaatcatgttatctgcgaacagagatagttttctttcctttgttttttctgccttttatttctttttgttgccttatttcattgggtaggaccttcaatatgttaagtagaagtggtaacaatggatatccttagcttgtacttgatcttagatggaaagtgtttactattttactgttgaatacaaagttagctataggcttttcataccttctttttatcagattaaggaaatttcttttattccaactttcttttttttttttttttttttttttggttgagatggagttcgctcttgtcgcccaggctggagtgcagtggggcaatttcggctcactgcaacctccacctcccgggtttgagtgattctcctgtctcagcctcccgagtagctgggattataggcaagtgccaccatgcctggctaattttttgtatttttagtagagatggggttttgccatgttggtcaggctggtcttgaactcccgcctcgccctctcaaagtgctgggattacatgcgtgagccttggcccccaggctattccaattttcttagaatttttatcaagagtaggtgttggattttatcaacagcttcttttgcatgtgttgaaatcatatttttctacttttatctatctctatggtgaattatactgactgattttctaatgataaaccccccttggtcatgatgtattatccactttatatattgatggattagatttgtgattaatttattaaggatttatatgtttattttcttgaggaatactactttgtaacttttttcttttttttttttaagaattgtctttgttagctttaagtattaaggttaagctgccctcaaaaagagttgagaaatgtttccttctcttttttctaagagtttgtatagggttgatattctttattttttggtatttgatatacttcatcagtgaatttatgagttttctttgtgggaaaatctttgataaattgaattattttatttatttatttatttatttatttatttatttatttattttcgagacagagtcttgctccatcgccgaggctggagtgcaatggtgtgatcttggttcactgtaacctccacctcccaggttcaagcgattctcctgcttcagcctcccgagtagctgggattagagatggggtatcaccatgttgggcaggctggtctcaaactcctgacctcaggtgatccccttgcctcagcctctctcaatttcttggccaggcacagtgggtcatgcctataatcctagcactttggaaggctaaggcaggaagactgcttgatgccaggagtttgagaccagcctgggcaatatagtgagaccctgatctctaccaaaaaaaaaaaaattaattagctttatgcactaattagtgcaatttctaacctggtttttaaaaaattgtgtatttttcagtgttatagtattcatatttataattttgttgtaagatattctatcaagctatactgttacttaatcctaaggggttttatcaaggtttataaaactgccttcagtgttcaggttggagaatctcctataaaagtttccttgctgtcttgcacaatatacagttaataaaagaaatacatgtaaatgcttttaatttaatggtatattcccttatatttttaaagcagtttcatcctcaagaagagcatttaagataatgtgaattttagcaaaatttgtctcacttttagatactatttgtatgtattattgctgtatctatttgaactcagcagttaaccacatttctctctctgttttgaagctaaatgttgccagctacctacaaatgatttgcttaactgagaattttagaactgatgtaaaagactttgtaaccttgttaactgcaaatacttgtgatatcagaaaaagtatcctttacttacaattctggattagaagtggaggtggagttttagaagaacgaccattaaccctttatcgtaagttgatttgttattaaagaaatttctattatgggaccctatttaaaaatctgtgctatggctgggtgcagtggctcatgcctgtaatcccagcactttgggggagtgaggtgggaggatctcttgaggccaggaggtccagatcagtctgctgaacatagtgagacccctgtctctacaagaaaatttatgggaggccaaggtgggaggatcacttgaagccaggagttcaaaaccagcctgcgcaagaaagcgagacccctgtctctacaaaaaaaatttgcaaaaattagctgcgcagggtggcatgtgcctgtaatactggctacccgggaggctgaggtaggaggatcacatgatccccgaagagtttgaggctgcagtgagctatgattatgccactgcactccggcccagacaatagagcaataccctatctctaaaaaaagaaaaaattatttatttatattttttgagatggagtctcgcactgttgcctgggctagagtgcagtggtgcgatctcggctcattgcaacctctgtctcccaggttcaagcaattctcctgcctcagcctcccgagtagctgggattacaggcccccaccatcacgcccagctaattttttttgtctttttagtagagatggggtttcattatgttggctaggctggtctcgaactcctgacctcatgatccacttgcctcggcctcccaaagtactgggattagaggcgtgagccaccgtacttggcccaaaaaaaaattttttttaattaaaaaaactctgtgctatgctagaatagttgaaagattataaaaattttaagcaacttgttatattaatcttcaaaataaatatgcacatgtcaactttgttcataaaacattttggcctggcacagtgtctcacaactgtaatctcagcactttgggaggccaaggggcatggattccttgagctcaggagtttgagaccagcctgggcaacatggcgaaaccccatctctacaaaaaattggctgggcatggtggtgcgtgtctgtggtcctagctacttgggaggcagagatatgaggatcactagaatctgggagatcgaggctgcagtgagccaagatcacgccactgcactccagcctgggtgacagagtgagactctgactaaaaaaaaatttttgcagtcaatgtgagtaaatagaattaaactggatctagaaagttggatttttttcctggctatgctactctttacaattaatatataagctccaaaattcactttacctttttgagcctgttttttcacctaaaaaaggagagatctgaactaatctataagttacttattcttttgtagttgagcttttaagatgatctcattgtttaattttaaaaaaacacacacaggctgggtgcagtggctcacgcctgtaatcccagcactttggaaggccgaggcggttagatcatgaggtcaggagatcaagaccttcctggccaacatggtgaaaccccatctctactaaaaatacagacattagccgggtgtggcggcacatgcctgtagctactcgggaggctgaggcaggagaattgcttgaacccaggaggcggaggctgcagtgagccaagatcgcaccactgcattccaacctgggcgacagagtgagactctgtctcaaaaaaaaaaaaaaaaattaaaaaacacacacacaaattaaaaaacaaacacaaaaaacctcccaccctgttccccctttcctcttcaaaagtttttcttttctttcttttttttttttttttgaggtagggtctcgctatattgcccaggctggagtatagtgactcttcatgggcaggatcataatgcacagccctgaactcctgggctcaagcgatactcctgtcctagcctcctgagaaggccactgtgttcagcttcctccccagaaatttgactcttaaattttcaaactgttacttatacatgtattaacatatataagtacttataacatagtacttataaacaaatgatactataattattatttaacaactttttcacttactaaaaacattaatttttctatatgagtatatatatatataggtatatagtattcttatgtaactataacgtacaatcacttttagcttcaggagtctttaaattctgtctttcctaaatactttattatttcagaaatgcttttatttcttattttttttcagtcatcattgttacctaattcaagtgagtaccttctccatgccaggtcttgtgtttacatggttaagacatggttccttgcctgaagaagttttagtttggtttccatgctccatagtcacggttttgtagttacagatcctattctggtaaatacacaaatatttcaaggaaaccaaggtgaaattatgtaatatttatccttatcagttttttcttctaatgagtttaacattttaacgtattctttttcttttttcttttcttttctttctttttttttttttttttttttgagacagtgtctcattctgttgcccaggctggagtgcagtggcagtgcagcatggctcactccagcttaatctcctggactcgagccgtcttccgccctgagcctcctgagtagctggaaccacaggcgtgcaccaccacagctaacttttttaattttttgtagagacggggatctcactatgttgcccagcctggtattgaactcctgggctcaagtgatccgcccctcttgggctcccaaagtgctgggattataggcatgagccacctcacccagcttcatattattctttttcaaagtagatatgcctatatattctattcagtgtaagcccatagctttaaccatttctcaaaagtaaatataatacataacacatggaaaatatcctggtgtaacaaattagttaataactttttgatataccactagatataaattgttacagcaagaaactttagaagacacaaaataacaaaataagtacagcataatttctcttcttttctttttttttttttttttttttgagatggaatctggctctgtcacccaggctggagtgcagtggcacgatctcggtttgctgcaacctctgcctcctgggttcaagggattctcctgcctcagcctcccaagtaattgggtctacaggcgtgtaccaccacacccagctaattttttgcatttttagtagagacagggtttcactgagttagccaggatggtcccgatctcctgaccttgtgatccgcctgcctcagcctcccaaagtgctgggattacaggcatgagccacagcacttggctggggccagtttctcttcttaaaaatctttttttatatacatttcatccctgcccttaaaaaaaaaacagatacataaaacaatattcccctacttcttgaaagtagccacagttagacctttatgcatgtaacataaagatacatacttatttagcaaaattaaccagtattatatatgttgttatttttaagtttattgttagcacatacgatcctatcccactgtctttcacagctgcatgcttttctatagaatagaatggatgtaccgtaatttaaccgttacttacagacatttacattatcttcaatttgtcattaaaatacagtgaatatctttatacatatatccttgaaaatgtctgtaatattgatggagagaattctagaagtatgactgctgggtcacaaacggtgtatatactttacattttgatagttgttgtcagactgccctctgatgataattgtaccaacttatgctcccatgaatagtatatgatggtttttttatgtgtactgctgacagaactacattataattcttttaattttgccaatttaaaaagtgaaacatgtacagtatcttattttaaaattacatttccatgcttagtggtgaaattgcatatctttttattaggtctttgaaattattattattatttgagacggagcctcactcagtcgcccaggccagagtacagtggcgtgatcttagttcactgcagcctctgcctcccgggttcaagtgattctcctgcctcagcctcccaagtagctgggattacaggcacgcaccactatgcccagctaattttttatatttttagtagagatggggttttgccatattggccaggctggtctcgaactcctgacctcaggtgatccacccgcctcggcctcccaaagtgctgggattacaggtgtgagccactgcacccggctgaaattactgtttcttttttcttccccctttgagttggagtctcgctctgttgccgaggctggagtgcagtggcgtgatctcggctcactgcaacctccgcctcccaggttcaagctattctcctgcttcagcctccctaatagcgggggctacaggcatgcgtcaccacgcctggctaatttttgtattttgaatagagacaaggtttcaccatgttgcccaggatggtctcgaacttgcccaggatggtctcgaactcctgaactcaagtgatccacctgcctcagcctcccaaagtgctgggattacaggcgtgagccacctcacctggcctgaaattaatattaggtatttatttttcttctgtgacttgcctgctcacagtccttgcactttttctgttggatggctttgaaagtcccccaccatcacctcacttaatttatctcttggtagaaataatgcttatggccaggcgcagtggctcacgcatgtaatcccagcactttgggaggtcgaggggggtggatcactcgaggtcaagagttcgagatcagcctggccaacatggtgaaaccctgtctctactaaaaatacaaaaagtagccgggtgtggtagcgcgtgcctgtaatcccggctactcgggaggctgaggcaggaaaatcgcttgaacccaggaggtggaggtttcagtgagctgaaattgcaccactgcaattcagcctgggtgatagagtgatactctgtctttaaaaaaaaaaaaaaaaaaagaataatgcttatattgtactcttaatgaattaaacacatatgtagagaactaaatgggggtatttgtccagaagatgtcaaaggatctcaggctttaaataattgtttgatacaatttgtttaatacatatatagagctaagattttcttttattttgtaggtggaaatagcagaaatgtacaactagtttgctctgaacatggccttgataacaaaatttaccctaaaaatactaaaaagaaacgtgtagaccttccaaaatgtgacagtggctgtgctgagaccttgtttggccttaagaacattttttccccatctgaagacttattttcatttttaaaggtattttcaatgtctgttttgcaatgttgaatttatattccttttcatattcccaacattagcctcctatcttttgaatcttaagtttaacttaaatgtgcctataatttgtataagccttaggtctctgattttaacacatcctaccactttgacaaatggtgcataggcattgctctgaatgcatattataggatttagaatagcatttagaaaatttttcagatagactatttcagaaaagtggttttaaataaatgagcttctaataatattggagtatatactaaatacatagagaatttaattctccaaattaatcgtctaaatttaatttttagacatagtactattttgatatattaaatatagataaataaaattatgaggggtagtgactcagtactttgaatttagaatagggataacactatattcatacaggtagaaaagtattcaaactatgtactgctgtaacatttctttactcaaaattgtttttcagcacaaaatcacaatgaaggaagaatggcataaattcatccagcttcttacagaattccaaatgcggaatgtagattttttatatagtaatcttgagtttattctaccattaccagttgataccattccagaaactaaaaacttttgtggcccatcagtaactgtggatgccagtgcagcaacaaaaagtatgaattgtcttgctaggaaacactctgaaagagaacagccattgaaaaagtcccagaaaaagaaacaaaagaaaacattggtaatattagatgatagtgatctatttgacactgacttggactttcctgatcaatctattagcctgtcctctgtatcatcttcctcaaatgcagaagaaagcaaaaccggagacgaagaaagcaaagccagagacaaaggaaacaatccagagacaaagaaatctattccttgtcctcctaaaacaactgcaggaaaaaaatgttctgcccttgtttctcattgtttaaattctctctctgagttcatggataacatgtccttcttagatgcacttttaactgatgtaagggaacaaaacaaatacggtagaaatgactttagttggacaaatggaaaggttacaagtggactttgtgatgagtttagtcttgagagtaatgatggatggacttctcaaagctctggagaattaaaggcagctgcagaagctctcagctttactaaatgttcttctgctatttcaaaagcattggaaaccttgaattcttgcaagaaattaggaagagatccaaccaacgatcttactttttatgtttcacaaaagcgcaataatgtatactttagtcagtcagcagctaatttagagtaagtcttacttcctttactttttattttttggtaataaatcgtaaaggggaaatcaatagagttttttcttaatttaaaaatgctgtactattgatcatggtaagcccttaacattaataatgtagcttctaatgagatagctaaagagaccagcttgatcgctgggaagagaaataatgagtgattggggtggatttaggtaatgcttgaatgacccaggaaggagtttggtcttgctgtatagttattgagattttttcagtatgggagtgattgatgtgttgacaggaaattaatctggaaatgtcatctggtctagaccagaggcaaggaaactaaactggttgtgattgggattactgcatttttcttgggcattaaaaattaaaaacaatgcattacttttacagcaatgcttggaagaggatatcagtcattaaaagtgtattttcgagtcgatctcttctctatgtgggtaatagacaagctagtataattgaatacctgccaacccttcgaaacatctgtaagactgagaagctaaaagaacaaggaaaaagtaaaagaaggtaaaggctttattaaaaacaacattttagatagctttttcaagattaatacatattttcataagatgaaaatgttaatattaaattgtatttttctttgtaattttgacagattcctgcactattttgaaggaattcatcttgacattccaaaagagactgtgaatactttggcagctgacttcccttaatgttccatactaacaatgctttgtatagattatcatgtggtccttaagatacatttttatattatgtggatcttcatggaaaagtatatttctcgatgtacattttaaacaaacaatttgtatatttttttattggcgggtaaatatttaaaatatttgagttacaaattttatatatgattgtaattttttttctgaattttttgtattatctgatttagctttgttggagtattttttgtatgtgagtgaactgtttctggaaggtagagttcattaagatgaactccctatttcaagtgtttatattatatattagcttaatattcagatacattatcttggctgctaacattagtgtcactaaagttggtatacaatctcccactgctaaatttgactggctttacaaaaacaaaaacattatctggtgaattatatttttaacctaaaagttaaggatcctcatattgtacagttttttttgtgtgctttttttttttttttttgagacggaatcttgctctgtcacccaggctggagtgcagtggcctggtatcggctcagtgcaacttttgcctcccgggttcaagcgattatcctgcctcagcctcctgaatagctgggattacaggcatgtgccaccttgcccagctaatttttgtatttttagaagagacagggttttaccatgttggttaggctggtctcttaactcctgacctcaagtgatccatctgcctcggcctcccaaagtgctgggatcacaggcgtgagccacctcacctggcctatattgtacagttttgaacagtatagatgcatacctgtttacaaatgtgtatgaagatagatatttttacctcttatttgttcaatttactttttcttgtattaattagtatattgatctaattaaaggttaaagctaaaggctttatgaaatgtttaaaaaagagttcagatgtaatcatcttgataaatatgtatattgtatgggtttgaatataggatataacttaaagatttcatccctgtacagaagagagaataagatcttctgaagtttttttttttttttttttttgagacagagtttcactctgattgtccaggctggagtgtaatgatgtgctctcggcttaccacaaccttcgcctcccaggttcaagcgattctcctgcctcagcctcccaagtagctgggattacaggcacccgccaccatgcccagctaattttgtatttttagtagagacagggtttctccatgttggtcaggctggtctccaactcccgacctcaggtgatctgcctgccttggcctcccaaagtgctgggattacaggcataagccactgtgcccagcctgaagtattttaaaaaatatttttaaaatactgttctttttttctcctcttaaaaaaaaaaagaaaataatgggagtattttcctccctaatatggacacatttaatattttatttatttttaggtttataataattcagggaaaaaatctttatcttttttttttttttaagaggtctcactcttgatctcactcttgttgcccaggttggagtgcaatggcacaatcatagttcaccatagcctcaaactcctgagctcaagtgatcctccttccttggcctcccaaagcattgggattacgggtgtgagccactgcacccagccttttcatttatgtttgtttgtttgagattgagtttcgctcttgttgtccaggcaggagtgcagtggcatgatctcggctcactgcaactttcacctcacaggtttaagcgattctcctgcctcagcctcctgaatagctgagattacagacatgtgccaccacgctcagctaattttgtatttttagtagagacagggcttgtccatgttggccaggttggtcttgaacttctgacctcaggtgatccacccgccttggcctcccaaagtactgagatgacaagcgtgagccactgcgcccagcccttttcattcttaaagatgatagtaaattcctgtaagatttagattcacttttgtgataatgccatgtttccgttatgaacaactaggtagttggagaaactattaaaatagaaaacagtggcaaaggagatggtttggatggaaagagaatgatttcctttttagacatgcatagtttgaggtatctatatttccaaagtggagatgtttaggtacacaatgacatatgtaaatgtagaaactttatttgtgtgtggcaacaggtctagagtgtataccaactctagggagttggaggtgctagagaagggagggcttcaatttcttgctttatgtttcagattatttgaagttttttcaacaaatatatttcacttttagattatagaaaatgtttatgttacagaaaatatttaatactttttttttttaagacatggggacttgctacattgcccagtctggcttcaaatcctgggctcaagtgatcctcccacctcagccttccaagtagctggcaggcatgcaccaatgatatttaatactttgacatcaaagagacttaggttcataaagaagatatattgaggacctcaactaatgtagacagtggtaaaatggacatcaaacgatggtctgtcaagttaaaatattgcaaagttaaaaaatgagcctgctgggcacggtggctcatgcctgtaatcccaacactttgggaggccgaggcaggaggatcacaaggtcaggagttcgagactagcctggccaatataatgaaatcccgtctctactaaaaatacaaaaattagccgggcatggtggtgcatgcctgtctgtagtcccagctacttgggaggctgagacaggagaattgcttgaacccaggaggcagaggttgtagtgagccgagatcatgccactgtactccagcctgggcaacagagccagactaggtctccaaaaaaaaagaaaagaaaaaaaaaaagagcctattagacaaagcttgtttgtttgtttttgggtaataagagttgagctgatgaaagtcatcttttggggctgggtatggtggctcacaccagtaatcccagcactttgggaggctgaggcaggaggattgcttgaggccaggaatttgagcccagcctgggcaacaaggtaagaccctgtctctacaaaaaataaattagccgggtatggtggcatgtgcctgtagtcctagctattcaagagatagaggcaggaggattgcttgaggccaggaggtgctgcagtgaactgtgattgtgccattgcactctagcctgtgtgacagagtgagaccctgtctcaaaaaaagaaaatcagcttttggaggcagtgtagcaaaccacattctacacacacaatcgtcctctaagagaggacgattctataagctgtattatcagttatctttagctttattctttctttttgagacggagttttgctcttgttgccctggctggagtgcaatggcacgatctcggctcactgccacccagttcaagcgattctcctgtctcagcctcctgagtagctggggctacaggcatgcgccaccacacccggctaattctgtattttttttttagtagagacagggtttctccactttggtcaggccagtctcaaaactcctgacttcaggtgatccacccgcctcagcctcccaaagtgctgggattacaggcgtgagccaccatgcgtggccagctttattcttataataagtaccacctaggaaaaccattattccctattttaacaatatgataataatgcaaatgtttagtatagatagtatttgcttttaaagggagataactttgtttcttgttttgtcaatttggcatcttactgtttcttttttttaatgaaaaatgtttaaaaattatgtggtcttgctatgttgcccaggctgctcttgagctcctgggcacaagcagtcctcctgcctcagcctcccacagtgctgggattatcggcataagccactgcaccaagccccatgttactgtttaacacattaacctgagaggcacagaatctcataaaatgtttattgatttggtcttggcttattgtgtaaaccatttaatagccaaaagtcagaatttaaacatctaaaatacactgaaaatgtgttcttttccaataacatggatgttcacaacagttggtgttacgttagagctaataattatactttagcacgttaacctcagaattctaaggctgagagtcaaacactgctaattcatagaaggcaatagcttgtaataatgaatcataaagctcttctactctttgtagttcagtagataaaaacatctgtctgtagtgaactattttatctgatgggaagaacacccgaggatccgccttcagtatagaatcgaagagaaactgcttcactagctcttttccactagtccgggagtcaccaatcatcagttcaaaatgcttccccactgcatttcgattcatgctcagcacctgatgctgcccatcctgggcaaaagttttatttaataaggcatacagcatggcttccatgatatgaaaatgtaacagtattggaaacagagatgagttctgaatggaaagtcctgttttttccagaacatagaaatctgctttaggcatctttgaaatgatcgaggaaatctttttaaaaaaagacaaaataaaggaacagaaataattcattacattttatgtttggtcccctctctgtcccacttctatttaaaaatattataattagttaatttatactatattgacaattttgaaataactgaaaaagccattttatgagcagtctggttctggtcatggttatgtcacaacaacagctaagctaagctgtttagtcctcctaagtaccagtttcttgatctgtacagtggacttcataatttctaaaatatgtattggctttaaggttagacaacttaaaactgttttactaaaccttcaaacattttctgggatagagcatacggttagaataactagcaagaatcaatcacctctgcaactgactaatcacatcagatgcttgactgaaccacagatttcatatgtataatcaaggtggtaattcctgaccattaaggtgataattcctgaccatttcgcaaggttttgaaaactcaaatgagacaatgtgatggcattttgaaaaataagctttataaataaaagagtgataatgttctataacatttagaatgaaataccattgattttctcagtatctgccttcgatgcataaggcatttcttgaactaactaaaggttgaatttttaaaaatcaaaggtgatggaaaacataataggaataagtgagtaacaagtaccagaagaaaacccatctttactattttattacattccttttgggaccagaagattaaactacacaaggagctctagcaggtaggaatctggaggtgcaactgccttacctcttctaaatagactgatgatgagtatattcctctcattaaactccaacggtcactttgctgccagtccagcactgtcaacttacgatcaaggtgagcccaggcaattcttcgagtaccaaaaacgatagatatgatactattaactgcctaaaagaaaagactgatttaattagaagtataaacattttagttttttctttttttgagacggagtctcgctctgtctcccaggctggagtgcagtggcgcgatctcaactcactacaagctccaccttctgggttcatgccattctcctgcctcagcctcccgactagctgggactacaggcgcccgccaccacgcccggctaatttttttatttttttttttagtagagatggggttttactgtgttagccaggatagtctcgatctcctgatctcatgatccacctgccttgacctcccaaagagctaggattacaggcatgagccaccgtgcctggccagaagtgtaaatattttagatgcaaacataatctacaaattcagaatgcctaactagtttatgtaatataaacttatttatagtttatgaactgagaattattaaagaaatgcaggagtaattattattttgtttgagatggagtctcgttctgtcacccaggctagagtgcagtggcgcaatcagctcactgcaacatccacctcccagattcaagcaatccttctgcctcagcttcctgagtagctgggattacaggtacctgccaccacacccagctaatttttgtatgtttagtagagacagggtttcaccatgttggccaggctggtcttgagctcctgacctcaagtgatccacctgcctctgcctcccaaagtgctgggattacaggtgtgagccaccaaggagtaattattattaaaaggtaaccagcagcagtcagtttatagataaaggacctatactcattctcagcaccttgcccaaagtaggcattcaaactcaagtgtagccaaggtctgcactagatactaggaaacaacaaacgtaactgtacattataagaaatgccaccataaaactattgtagagagaagtggtcagggaaggtttactggaggactaggagaatgagacagtaaatgggaagttatttcacccagatgtctggaaagataggctgtttgacatctcacactctggcagtagaataaagactgaataggaaaagggcagaggacaaggcagatgtctataaaggtaagtaacttgctttatcctgagtgctacaggggccactaaaaaaacagaattttaaggaataacataagatttacatttcagaaaaatcactgatggtgtaaaagatgggctggagggaactaaaggtagggatctgtgttaggtacctgttacaacatgagaaagtgttaagaattgaagacaatgacagaaggaaaagaaacagatagtgggagcagaattaatacataggtttaacgaggagtctagaataattccagttttatatcagtgactgaatggcatcattaatgatgacgaagataggagtcacatgacctagggaaggtgggaagaaatttttttgttttgttttggtttgtttttaatgcattaagtttgggttgcctatagggcttctaagaggagatatataataagtaattgaatatttagattttgcttcctatcaagtctgggctgacgatgaagtacaatgctatcacctttccccaacatggctcacttagttatattaacaaactaatatgttctatagatacagaggcaaataaacaggaacaattagttgtatacccatctccctttcattgctaaggactggataaatatcttaaagacaaaatagtatagatgcccaaaatacagacttccttttggttttctttagctaagtgactctcaagctttactgtgcacaagcattactgaaccagactacacacaatacttcgtcggcaatcgattttttcttaaaggattttactgcatgacttatatctccataaaaactgacttaaaatccagccccctaaataagatgcaactccactctaatctgggtataaatagttttggccatgaatctggatgagaatcctccctgaagaatttggttaaaatatgttccagatcaattgcagcagttctacttggagtccatgagtggacttaacagaatctgccagtcctctgaaactgtgtagtattctgtgtatatgtgctatatctttttctatgggaagagggtccacagctttcatcaggttttcaaaagtacccatattcctcaaaaaacggacccactggtccagaaaaaaaatggtgcttatgatttttatgagataatgattatcaagcaatgttacacaggacatgagttcctctaaagtttaatacttgagtgctgtggccgggcgcagtgtctcacacctgtaatctcagcacttcgggagcccgaggcaggtggatcacgaggtcaacagatcaagaccatcctggcgccaacatggtaaaacctcatctctactaaaaatacaaaaattagctgggcgtggtggcatgtgcctgtagtttcagctactcaggaggctgaggcaggagaatcgcttgaacctgggaggtggaggttgttgtgagatcatgccactgtactccagcctggcgacagcacaagactctgtctcaaaaaaaaaaaaaaaaaaaaaattggctgtgtcaaatatttctagtatttatttttttaagacaatagaaaaagaattgcttttagaatggtgttttttttttttttttgagacagagtcttgctctgtagccaggctggagtgcactggcgtgatgtcagctcactgcaacctctgcctcccaggttcaagagattctcctgcctcagcctcccgagtagctgggactacaggcccacgccaccatgcccagctaaattttgtatttttagtagagatgggctttcaccacattggccaggattgtctggatctcttgaccttgtgatccgcccgctttggcctcccaaagtgctgggattacaggtgtgagccagccgctttttttttttttttttaatcttacctatagacttgcatgattcaagataaaatgctttttaaaggagaaaaggtacagaaaataattttaaattctgccggaaagactggtataatgttctaaagtcactcactggccataacctatctttgctccttaatttctcattaatcctaacatcacccttagacacagcctggtatctccaacgacactcctcttaaataagccttgcctagacctgcttctcagcatcaactgttctttctacctacaatgccctcctctcccatccaaaggatctctcttttaagacctaaattgagttcttccagtaaactttccacaacagtcacagcccattgttttctctcctctcaactgccaatttactatctgtacatctcattatttggtagtgatcatatacttgccaactaaacctgaagaaccctgtcttagccacttcccaacccaatgcccagaagagtgctttctagagtaggttctcaaatattaggcagtatagcagacatgaagaatataccttaagtctttctctttctatgtctggtttgaggagctttctcaggaaccggttttccggtgactttcttttttcccgtccagtctttggacaaagtatggagttacaaacttgaactgtacttttatacttaaacaagggcacattcattaaactctctaaattctgaaatggcccaaagttttctctgtgctctacgatattgatggaccttcttccacgaagcaatcggaaagcttcaagttctttagtagatgctgtattcaacacatgcaagatggaagcctgctgttctgaagagaagagcttgtcaagtgcattttcgggctcctttgcattttcatcacaaaaagtaacattgggagtaattttcttaggtgtagtggattttttccgacagcagaaattatgtaaggcccagtacagggatgacctcgacggggtcagaaagcatctccacctctctaaaaggaaaatttagcaaaatataagttggatgtcctacttcctttggggttagttgcaagcttgactagatcctttgcaaagtcacaaatactttcctggaatttaagaactaatagaggacaatattaaattgtcttggagaatcatcttttttttttttttttgagacggagtcttgctctgttgcccaggctggagtgcagtggccgatctcggctcactgcaagctccgcctcccaggttcacgccattctcctgcctcagcctcccaggtggctgggactacaggcgcctgccaccacgcccggctaattttttgtatatttagtagagacggggtttcacagtgttagccaggatggtctccatctcctgacctcgtgatccgcccacctcagcctcccaaagtgctgggattacaggcgtgagccactgtgcccggcccgagaatcatctttaaaagaggattagtttttaaactatattatatagagttttaaatagagcttttgttgttttcaagtcacgagagatgtctcccgatatttatggatcagtccgaagttttactacctagaaaattgtattttatacccatcaggaagcaagtagttgaaataattattccaactgcttaaagtttctgatatttttaatttagaggaatctttttgtaactaatatttcctgttaaggtttgtcttaggccgggcgcggtgactcacgcttataatcccagcactttgggaggccgaggtgggcggatcacctgaggtcgggagttcgagaccagcctgaccaacatggagaaaccctgtctctactaataatacaaaattagccgggcgtggtggcacatgcctgtaatcccagctactcgggaggctgaggcaggagaatcgcttgagcccggaaggcggaggttgcggtgagccgagatcgcaccattgcactccagtctcggcaacaagagcgaaactccgtctcaaaaaaaaaaaaaaaagggttttgtcttcacttccattttcacattttagtatctcatctggtggaactaaataaaattaaattttgtacgtttataagaaatgtttcagctaagtgatagatttaagggcagttttactttcttccgtacacttttcaagacttctacatgacgtttttgcaagtatgagaaacaccatacaatgcataactttgtaaaaccagtgggaagtcactctaacatcgcagccacaggaaagtaatgtggccagaggtaagcaagcggctgtgagaatgtgaaccatccgcccactctgaggagccacccgtggaccctgaggccggggaagcacaaatgttccgaaaactgccccgtcagctaggctggggccccaagagaggggcctgaacaagggacatgaggaaggaaacactctaggacatgagggacatgaggaaggaaacactccaggttcctccagaatacctccagccgtattccattagcctctagggtcagaggctaatgacagacgggaaatcaccccagtgttccaagcaccctacctcccgccgtattccattagcctctagggtcagaggctaatgacagacgggaaatcaccccagtgttccaagcaccctacctcccgccgtgaagaggacagacccgctcatctccaagttgaatcagtaggtccagtcttcctccattgacttccggttcctgcgtgctgcgcccaaaagcgctcggcctgcactcggcggaaaggttgttgtccaagcggcgttccggggcaaggcccgaggtgtgtcccgctgagcagtgggtcgtccgcgtctgggctgcgggcttccaggcgggcgcctgccgaggccctgtccccggatcccgagtccctggctggcccgcagtcttcttccactgcaccggggaaacgttcttgcccctaccgactcctgagagccgctgggccgaatctccaggaaggcgattccgaggccagttttagtctgtagtgggtaaagtgcctccttcgtggagactccctgggtttctcctagacacttagattgaggagctcctgttggggcccagcctgtggcgccgggagcgggatcaggtaggggcagcgtagacaaggtcctcaaataaccttttcaccaggtagactggaataacggggagagatgcgaagtgtttgaggagctcagcggggaaacagggcaggcaagggattaggtaaaggcgagggaggaggagattgcgttggcgctggagcggtattcctcttagaagggataaagggagatgaatgtagcgccgaatttagttggtccttgaataatgggtggagcagttgaatactccaccagataggaagcctgaagtccccgaggtttatgatttgcagtcagactggagagtgttcctagaaaattggccatatactgtatagcgaatgtgaggctggattgcaggtgaagagcctgggagcaatgagaagtcgcgaagagagtgtatcttcccaggtgagaggcaagcgtaaggaattttttttttaacagtcttgctctgtcgcccaggttggagtgcagtggtgcgatctggactcactgcaaactccgcctcccgatttcaagtgattctcgtgcctcagcctcccgagtagctgagattacaggcgagcgccactacgcccggctaatttttgtatttttagtagagacaggtgtcaccatgttggccaggctggtctcgaactcctgacctcaggtgatccgcccgactcggcctcccaaagtgctgggattacaggcgtgggccactgcgcctggccaaccgtaaggaattgaacctaggagatgtaaggagagtggaaagaaaagaattatttctggaagatggggagccagttttgtgaaaaacggggaattcaggagggagggaaaggtgatgagtttgcgtttttatgaggcagcaatgggttgattgtttgtgtctggaaggcagtggggatgtaggggaatcataagtattaataaaatgtgctggtcgggagcagtggctcccaaagtgtaattccagcactttgggaggccgagacgggcggatcgcttgagctcttgagttccagaccaccctgggcaacatggcgaaaccccgtctctacgaaaaaattagccgggtgtggtggagcacgcctgttatcccagctactcaggaggctgaggtgggagaatcacctgagcccgggaggtagaggttgcagtgagtggagatcgtgtcaccacactccagcgtgggggacagagccagaccttgtctcaaaaaaagaaaaaaaattgctcataggaagtctagaaaccttggcagtttctggggaacttaggaatctaacaagaaataacatcaacttttttctgcaaaatcctccaaatcaggaggaaataatttcctcaactgtagggcttattcagtttactgagatgttatgattgaattgcatccctcaaaacagatttgttgaagtcctaacccccagtaccttattatttccaaataaggtcattgtagatgtaactaattaaaatgaggacaggaaggccggcacggtggctcacgcctgtaatcccagcgctttgggaggccgaggaggggggattacgaggtcaggagatcgagaccatcctggataacacggtgaaaccccgtctctactaaaaaatacaaaaaattagccgggcgtggtggcgggcgcctgtagtcccagctactcaggaggctgaggtaggagaatggcgtgaacccgggaggcagagcttgcagcgagctgagatggcaccactgcactccagcctgggcgacagagcgagactctgtctcaaaaaaataagtaaataaataaaataaaatgaggacacgctggactggggcagggactaatccaacatggctgctgttcttatgagaagatgactctgtgaatgccatgtgaagatggaagcggagattggaatgatgctttctacaaacccagaaaggccaagggttgccaatagtcactagaaactaggagagaggcatgggccagagtccccttagagccctttgaaggaacaagcccggataacaccttgattttgggcttccagcctcctgaactggagagaataaatgaccagtttgtggtcatttgttacagcagccctaagaaactaatacaagaggccataaggattcctggtgttgctttcagagatggtctggttcgctagcaagacacagtttatcacttagtaactgcatcaccatagtcagtttcttatcctctctgaacctcaccttcctcatttgtaaaacggagttaatggtacctacctcacagggctgcttggaggatgcatgagaaactggatgcaaagaacccagcataagataagagttcaatcaatgtggttttgcccagtaaagcatcccccctcttcctgagaaatgattatgaatgacctataggggaatcaccctccttcctgaaagcatttattcagaaatatgctttgaccagagccagaaatacaaaggaaagagataagtattgcctgatttactgtaaaccagaattgatgcctccaaaatgaaagtcaccgtcttcccccaaaaactagctccttctcacttccctgtttttgtcacccagatgcaggtgtctctggctctttctactccttccatcattatgtctagcctgttatctagtttctgtgtttttaaaacttttgactgatccaggatacatgtgtgatacaaaagtttcattaaaaaaaaaaaaaggccaggtgtggtggttcaacacttgtaataccagcactttgggagagcaaggcaggcagattcattgagcccaggagtttacgaccagcctgggcaacatggcaagaccccatctttaccaaaaataccaaaaaaaattagctgggcatagtggtatgcgcctgtagttccagctacttgggaggctgaggtgggagaatcccttgagcctgggaggtggaggtcgtagtgagcagagattgcaccactgtactcaagcctgggtggcagagtgagaccctgactaaatgaaaaacaaaaacaaccattgtatttttgcatgtgatacaacctgatattttctatttccttcttttttttttaagttaggagtgcaaaaggtttattgaaaaaaacaaaaacaaactaaaatctgttttgaagcctgcaggacattagagggtgatgtccaatagatagagatgcacatctgaagctaaggaggagcactgagctggggtgtatgtttggaggccgtcagcctgtagagatggtactttactcatgagaacagatacgaggagccagggagagggggtaggcgtgagaaaagcacagtgagataaggagagaactccttgggagcaccaccattagatgtggttagaggattccgattcccaagaagattgagaaacaatgttcacatttaaaaggaaacaggaggctgggcactgtggctcacgcctgtaatcccagcactttgggaggccaaggcaggcagatcacctgaggtcagaagttcgagaccagcttggccaacatggtgaaaccccatctctactgaaaatacaaaaattagccgggcgtggtggtgggcgcctgtaatcacagctacttgggaggctgaggcaggagaatggcctgaacctggaggcagaggttgcagtgagccgagattgcaccactgcattccagcctgggcgataagagagagactccgtctcaaagaaaaccaaaaaacaaaaaacaccacattgcaataccactacacacccatgagaatacctactggaaatctcatacattgctgatggaagtgtgggttggttgaatcactttgaaaagctggcaatatctactaaagctgaagatttgtatatcctatggtcctgcagtccaaccccgggtgtatatccaacagaatgcaaacaaatgtgcactaaaggacatgcaactaatggagctatatgtataaaattgccagtatttgccagttgtctatttgcaaaaatggcaatttcacatggttaaacctgattacaagaatgctcatagcagcactatttgtattagccaaaacctcaatggcagattattgtgtatatattgaataaacgtttcacccagtaacatgggtaaatcccacaaatatgatgttgaatgaaagaagccacacagctatatataaagtacaaaaacaagccgggtgcggtggctcacgcctgtaatcctagcactttgggaggccaaggcaggcagattgcctgagctcaggagttcaagatcagcctgggcaacatggtgaaacctggactctactaaaaatacaaaaaattagccaggtgtggtggcaggagcctgtagtcccagctactcgggaggctgaggcacaagaattgcttgaacccaggaggtggaggttgcagtgagccgagattgagatcgtgccactgcactccagcccaggcaaaaaagtgagactgtctccgggaaaaaaaacagactaaactaatctatcatgataaacatgagattacctttgggactagtcactaaagagagaatgggaatgttttgggatgctgattatcctcttttttaaaaaagctctatatgctagttaaacacgtgtgtgcactttgtaaaattcattaagctgcatacttgtgatttgtgcacttttctgtatttgttatacttcagcaaaatattacttaaaagtttaattcttggatgggcatgttggctcacgcctgtaatccttacactttgggaggctgaggtgggaaaattgcttgagaccaggagtttgagaccagcctgggcaacattgtgagacatcgtctctatggaaaaatctaaaaatagccaggtgtgggctgggcacggtggctcacacctgtaatcccagcactttgggaggccaaggcgggcggatcgcgaggtcaggagatcgagaccatcctggctaacacggtgaaacctcgtctctattaaaaatacaacaaattagccaggcgtggtggcaggcgcctgtagtcccagctactcaggaggctgaggcaggagaatggcgtggagcggggaggcagagctttcagtgaaacgagattgtgccactgtactccagcctgggcgataagagcgagactccgtctcaaaaaaaaaaaaaaaaaaaaaagaaagccaggtgtggtagcacatgcctgtagtcctacctactagggaggctgaggtgagaagatacttaagcccaggattttttttttttttttttttgagacggagtctcgctttgtagcccaggctggagtgcagtggcgcgaactcggctcactgcaagctccgcctcccgggttcacgccattctcctgcctcagcctcccgagtagctgggactacaggcaccagctaccacgcccggataattttttttgtatttagtagagacggggtttcaccgtattagccaggatggtctcgatctcctgaccttgcgatctgcgcgcctcggcctcccaaagtgccgggattacaggcgtgagccaccgcgcccggccaagcccaggatttgaggttatagtgagccatgactatgccactgcactccagcctgggcgacagagtgagaccctgtttccaaacataaaaaatagaaaagttgtctggggcttggtgcagagggtaatgcctgtaatcccagcactttgggaggccgaggcaggcggatcatttgaggccagggtttgagaccaacctggccaacatggcgaaaccccgtctctactaaaaatacaaaaattagccaggcatggtggtgctcgcctgtagtcccagctactcaggaggctgaggtgggaggattgcttgagcccgggagatggaggctgtagtgagctgagactgcgtcactgcactccagcctgggcaacggagcaagaccctatctcaaaaaaataaaaataaaataaaataaaaaataaaaaagttgaagtcttcaaattattttgaattagatttgtatcatataaggtttgaatgtttatttagtgacatagtctactttatttagtcctcaaagtcattcatcaccttatatacagactcccgagaaaagggctgctgatccttgaatagatcattcagggtagcgagcacgtgatgtatttctctgagtgctccacccccaactctcagggatattttgtaaaggaaagataattgtcctactaatcttcgtctcggtaaagttttggatttttttcctgcttttatgttacattttattattattttttcagtattatacacaactaaaatgattaggcaaatgatcaaaataaaacacagcactcacaatttgagacccagaatcagaaaacttggctcatgctccaatattgctacatatttcctatgtatctcagtttatttctataagaatagttttctcttttgcaagacaaaattcaaagtacccctcttacaaggttgttactgaaataaaatgatgtaaaatagaaagtcttatacaatgagaggtttttttttttttgacacagagtctcgctcttgtcacccaggctggagtgcagtgatgccatctcagctcactgcaacctctgcctcccaggttcaaacgattctcctgcctcagcctcccgagtagctgggactacaggcacctgccacagtgccctggctaatttttgtatttttagtagagaaggggttttacaatattggccaggctggtcttgaactcctgaccttgtgatccgcccgcctcggcctcccaaagtgctgggattacaagcatgagccacggcgcccggccaagagatattgttaattggcaaattgattctatatattaaaatgaggtgtgattggccaggtgcggtggtttatgcccgtaatcccagtacttcgggaggctgaggtgtgcgcatcacctgaggtcaggagttcgagaccagcctggccaacatggtgaaaccctgtctctactaaaaatacaaaaataagccaggcatggtggtgcactcctgcaattccagctacttgggaggctgaggcaggagaattgcttgaacccgggaggcggtggttgcagtgagctgagatcacgccattgcactccagccttgaccccagagcgagactttgtctaaaaaaaaaaaaaaaaaaaaagaaaaggtgtgattgtctaagaggaaaatacccagatgcttggtaagacaatcccttatatgatttattttaggtataactaaagaaaatagaacttttggattttgggtttttatttttatttacttatttatttttaatagaaacagagttttgccatgttgaccaggctggtctggaactcctgggatcaagaggtcctccctccctggtctcccaaagtgctgagattacaggtatgagccaccatgcccagccaaacttttggatttttaaacccagttttaaaactcaagttccataaaggagcaccccagtgttccaatccagtttacaacaggtgtcactctaaccccttcaattatagttgtgcctaaacctctataactaacttctcatttagtgttgcaggtaatgatgtaaaatgcaaacaattatcttgggtctatttaggacctcttttctggctcttcagttttcacaaatggatacttcatctctctggatctctattggatcattgcattttattcagaatgcaaactcctacaaactcctggactacctgtgtaatgggggtctcaattccactcagttcaccaccattttaaaacattgttgcaaaatccacataacaaaaaattcataattttagggttcaattcagtgacatttagtacattcacaatgttgtgcacctatcaccattatctagttccagactttttttttttttttttttgagacagggtctcactcagtcgcccaagctggagtacagtggcacgatctcggctcctagcctccacctcctgggtacaagcgattctcctgcttcagccacccgagtagctgggattacaggcgtgcgctaccatgccttgctaatttttgtgtttttagtagagacggggtttcaccacattggccaggctggtctcaaactcctgagctcaagcaatctgcctgcctcggcctcccaaagtgttgggattacaggcgtgagccaccacgcccagccctggttccagaacatttttaacaccctaaaaggaaaccttacccattaagctgtctcttcccagtccctctgcccccaagcccactccctccagctcctggcaaccgctaatctgctttctgtctctatggatttgtctgttctggacatttcataaaactggatcaaccaaaatttttcaggcccagcatttgctaggcaccaaggatacaaagatcaatatgacaatctgctcttaaccaaatcacgctgactgggacaaaacaagttaaaaaaaaacaaccatagtccaacgtgatgactattgtaatggaaatatgaacattttgggaacatagttcagggggatgagggtgagctggaagaagtcagatttctttgaggagtctcgctttgtctcccggactggagtgcagtgaagtaatctcagcccactgcaacatccacctcccatgttcaagcgattctcatgcctcaacctcccaagtagctgggactacagacacatgccaccatgcccagctaatttttctattcttggtagagacagggtcttgcaatgttggccaggctggtctcgaatttctgacctcaggtgatcagcccacttcggcctcccaaagtgttgggattacaggcgtgagccactgcacctggtcaaaagtaagacttgaatttaggcatggaggcaggagtttgctccaccaaccaatggaggctgggctggatgatgttgtagaggagagagctggggtaggagaaggggcagcatgagcgagatacaatggcatggagttggatagctctgtgttcaaaggatgtggacagatcacacaccaagcacatcccagggcctttgcccaggttgttctcttcccctaggacactcctctctcaaattgctgctggttggcttgaccccttcctgcagatcttaaatgttagatctgagcttaaatgttacctgctcagagaggacttccttgacctctctattgaaatagcaactttcattcctctctatcccctcacttgtttctttttctttatagcacgtatcactcttgcactatattgtatatttgtttctctgttcatttcctgtctccctaacttgaaggtaagctccacaaaggcagctatttccccagctatgtggccatatctcagtacccataacagtatctggcacatagtaggtgccccataaataatgaacgaatgagcaaaccctgaggcagtactgcagtggggagtccctttgagatctgagtggttccagttgctgaagacaaggtgatattaaacacacaaatatgttggtcaactcaatcacattatttactctgcatggctccttatcagctgtttcacttgccttcaaaaggaattatttgtttccttcaaaaaggaaaacactttgtgatcccaagtcctctcactttattgattattattttttaccgatcctcatttctttgtttatttagcaaacatttgttgaaaccctgctatgtggcatgcaggtgctagggatacaacagagaacacaactgaccctgtcctcatgaagcatagaagtgtgacagaccagtaaaccagcaagcaattacagtagagtagtagaatataatgcttgaaaatacagttttttgttttagtctgttttgttttttgagacaaagtctcactctgttgcccaggctggagtgcagtggtgtgatctcggctcactgcaacctctgtctcctgggttcaagcgattctcctgcctcagcctcccgagtagctgggattacaggcacacgccaccatgcccagctaattttctttgtattttttttttttttagtggagaccagggttcgccatgttggccaggctgatctcaaactcctggcctcaggtgatctgcctgcctcaaacttatgcctgtaatcccagcactttgggaggctgaggcaggcagaccacttgaggccaggaattcgagaccagcctgaccaacatggtaaaacctcatctctactaaaaatacaaaaattagctgggcgtggtggcacatgcctataatcccagctacttgggaggctgaggaacaagaattgcttgaacctaggaggcagaggctgcggtgaaccaagatcgtaccactgcactccagcctgcgagacggacagaggctgtctcaaaaaaaaaaaaaagaagcataatgttaggttgaactttatggcattgctattgccatttttgtaagtcagtttcatgtggttcaacctaatatattggtgaaaagagtccaaggcagacttgaattcaaatcccagcttcagtatgcatgattcagtatacaacatctcagttgtgtaaccttggacaaatgtacttaccctctctctgagccacagtagtctcatctgtaaaatgggcataaacatagtctgtacctcagggttatggctaagattaaatggaataatgcatgtaaggggtctggtgcactgcaatcccagaataaatggtggccataattgtgggtggtggttttttctttagttactgtatttttcaaatttcctgtaatatagctttttttaattctaaagctaataaacataattatttaatttttttgtttgtttttgttttttgagatggagtctcatcctgtcacctaggctggagtgcagtggcacaatcttggttcactgccacctccagctcctgggttcaagcaattctcctgcctcagcctcccgagtagctgggattacaggcacccaccaccacgcctagctgatatttgtatttttagtagagacggggtttcaccatgttggccatgctggtattgaactcctaacctcaggtgatctgcccgcctcggcttcccaaagtgctgggattacaggtgtgaaccactgtgcccagccaattatttaattttcaaaggaattgtgttctatgccctgaagatcttgagtggggaccttgaggctgttactgggaatgtggttgagggctttcttccagccctgctgcagcttggcttggctggacaaacacagtgacctgagaacagggctagatgtttcttcttggtgggaccctgggagctttatttacaaaggacattctgtcccacagcccaaattgctccctcactccagcatctgctgtattgactgagccctttagagaggctgctttgacccatcctgtccctcaaactctgggtcacagtgctcagtgtccaccttggtcatgacagcctttggcatggtcctcttcacttagaagtagcttctgggtcctgagcacagaagctgagctcaattttcataatgtccagtatccaggagtgggctacagagttttgttttatttttgagacagagtcttgctttgttgcccaggctggagggcagtggcgtgattgtggctcactgcaaccgctgcctgctggacccaagcgatcgttccacctcagcctactgagtagctgggactacaggcatgtgccaccatagccagctaattttggtaatttttgtagagacagggtttcaccgtgttgcccagaccggggctacagtttctgtttaggttgatgcaaaagttttggaaataaatagtggaggaaatatagggtacagactttcaattataagaagaattctggggatctaaggtgcagtatggatggggatggatgtgttcattaatgcgattgtgggaatcattacacaatgtgcacatatgtcaaatcatgtacacattgaatatatacaatctttctttgtcaattaaatatttgttaaaatagtggggataattgcacaacattgtgaatataattgaatgcaatcgatgacatagtattgtacacttagaaatgattaagatgggtggggcatggtggctcatgcctgtaatcacaaagctttgggagactgaggctggaggattgtttgaagccagaagttggagtccagcttgggcaacaaagcaagcctctgtctctgtgaaaatagaaaaataaaaaaattagccaggtttggtagtacgttcccatagtcccagctactcaggaggctgaagcaggaggatcacttgagcccaggcattcaaggctgcagtgagctctgattgtaccactgcactcaagcctgagtgacaaagtgacccccttgtctctaaagaaaaaaatggttaaaatggcaaattttgtgtttagattttatcacaattttttaatttatatatatttttcttttttttttttttttttgttttttttttggagcaaccttattaaccgaaccacaatttaagtaaaaaaagaaaaaaaaaagtccagaatgcactaaagggaggtttcatgaaatcacctgggactgactgagccacagtaggagatctggatttaggccctgttccgcttcttatttggctccatgaccttgggtaacttaaatcctctgaggctcagctttctcttctgtaaagtggcctgatgtgatgctgccctctgagggtgtcatgaagctaaaatatgatcaaatgtgtgacgctcttgtaaaaaaaacactcagtaattgttcattagcattgtcctacaaccaccaccaccaaaaaaaaaaaaaaaaaaaaaaaaagaaagaaacaaagaaaagaaaaaagaagggaaaagaaaagaaagcattataaacaaaataccagagtacattgttttgctctgaggatgcctgaaatgccacattaaggctgtttgatgggaacctccagaaataaggaagggaagaggggaaactaaaggaatctctcaatctctggctcctcactatgaatgagatactgtatgttctcttggattggctattttttttctttttctttttctttttttttttaattttttttttttttttttgagacagagtctcactctgtcgcccaggctggagtgcagtggtgcgatctcggcttactgcaaactccgcctcctgggttcatgccattctcctgcctcagcctcccaagtaactgggactacaggcgcccaccaccacacccagccatttttttgtatttttagtagagacggggtttcaccgtgttatccaggatggtctcgatctcctgacctcgtgatccgcccccctcggcctcccaaagtgctgggattacaggcgtgagccactgcgcccggctttttttaaagtttctgagattcaaccagagcctacttagaactgggttggcttttgtgggacctacagggaggtggcagtgagacctaaggtgtcagagaagcaaaggagcacagactggtgaaggctcgggtgccgaggaagcacccccagcatcacaattttgtcccagtgttgggcagaggagaaatgtccttagcttgtctcctcttctccctctctccctctttcctttgccttcataccttaagttgactttcccatctttctcctgggagatttatttctgtcccttttttcatctaaagcaacggaaatgaatcatctttcagccggtttaataaacagccccatgccccctgaccccagctgactctctcactggttcctctgtggctgctcctgggctaggcctcaccccctcacaggcaagaccccctcatggctggctattcttggtaatactctccaccctcccttcctgctcagtcctggcagcttgacctcctccaccccagggatgacgggaatcacacacagcattccaagcgacaattccacaagctgaccataggggcaggggaagcaaggaggccaccatgtttggagggtttctttgtgccatttcaatgaccctattagtggatcttacgctctccatttaacagttgagggtttggaggctcagagaagtgaaggaacttgcccagagacaaacagttgggaaatgtggaaatgaaggagtcaacatttaaagcctgaatttctggattcctgaattcattccattacaccatattgctgtgcgtgtgtgtgcacgtgtgtgcttgcgcccgcatgtatgttgaatgggagtgtgggcaggtcagctagaacatcagctgcaattcaccaggatggaaacctgattttatcctgaaggttaacacctgtctatcatatgcatatggcttaatgcatctgtgtgcattaaggtattaacctacatagaagatggcaagtatgtacagtatatatttcaccaggaggcccatgagtcattgcagatgatgtcaaggagtaacgaagatgatgtcaagcagtaacaaagatgggagagagggaaagaggaaatgaaatgcccacatttaagaccacctataccctgccttcacctcgcggtgatggaacttcacaggttaaagtgcctggctgtgtccaccttggtgaaaccacacttttctggtgaacaaaatcatgcaactattagttggacttctaaaaatgtgcaggtatcatttataggagcaatatggaatacagacataaaactgctgacgtcaaactccctggtgtggacatgtgtatgtgtctgcggtcagagagtggaattaacacaagtatataaataaccgtgatgcaaggtagatagaaagtgctcaggtccaaaacaaatagacagatactacaagagtattcttggagacccagaggctggaaagattactccaggcagggtatcacagagggcttcctgaggaggtggcatttgcatataaatacgtctccaaatagatgtaagatcttacattaacagaacgctttaacagaagttagattctggttaattttccaagaagcgctgagatgcagacatatgcccttgttcctctttcatagacgcggaaactgagacccacagaggttgaataggttgtccacagtctcgtagctaccaagtgacaggccacgatttgatctcaggccagtgtgttaaactccaatttgcgtgctcctgtccctccccgcgcgtcggcggagctcggggccggactggacctgccgagggaggggcggacagtcctgacggtgcggggcggggctggcggctgcccaggcctggctgaggcgccgcggccgggtccctctccacctgccgggcggagcgcacgggccatgggctgagccccgctgagcccgccgggccggccatgggcgatcgcgagcgcaacaagaagcggctgctggagctgctgcgggcgccggacacaggcaacgcgcactgcgccgactgcggggcggcaggtaagggcgcggcggcgcgggcagcgcgagacccccggccggaccccaggcccacccgactcctcccctcggccccaccgggtcccgccctcggccccctggacccagacgtggcacctgcgggccccgacccctcccacccacaccgtgaacctctcacccgagccccgagggccgtctccaccacaccctgccccggcccctacgagcccaggctctgctcccctcgcgggaccagatgcgcatcttcccacgtgcttggacccggacacgagagccggcagcctagagcccttccagtcccgctctcttccctggccaggcacccgaccgcccgagtccgggctctcgatgtctgcgcacccaggcgcgccccacgccctcggactcagacatcccagccagggctaaacgtcgggcccaggccgccgacagtcctgtgccccctgcccgctcccagacgccccccgaaggcctccccagcgccccacctcggggacgccgagggccccctaactcagcctccccacctgcagctccgcgccgagccccgcggtgcgccccccgcgccctcctctcggttccttctgagtcccttcacttccacgtcgcgcagcctcagactctctccccgggccctgaactgcctccaggatcttcaccccggtcgccgcgcagcggccggtgggctaaccagaaggtgccaggctggccgcttagttcgccttaggtgggagaaggggcgccccacctgccccagtgccccgagcccagccctggtttcttcaccgcgctttccgctcagctcctctcctgcctcatcccctgcagatcccgactgggcctcttacaagctggggatcttcatctgtctcaactgctgcggcgtccaccgtaacttccctgacatcagcagagttaaatctgtgcgacttgacttctgggacgacagtattgtggaggtagaaaggcatgcccgtggagagccatggaactgcgggactggagtagaggcagcgggcagggggctcccattctacagagggggaaactgagaaccagagaggggcaagtctagctagaggaaacacagcttataagatggcagcttagacagaggccgagagttcaaattctggctctatcatttgcttacttttttttttttttttttgagacggagtctcgctgtgttgtccaggctggagtgcagtggagcaatcttggctcactgcaaccgctgcctcccgggttcaagtaattctcctgcctcagcttctcaagcagctgggattacaggcgcctgccaccacacccggctaatttttttgtacttagtagagacggggtttcaccatgttggtcacgctggtctcgaactcctgacctcaggcgatccaccacctcagcctcccaaagtgctgggattacaggcctgaaccatcctgaaccgctcctggccatcatttgcttacctataagctgggaggccctgagctaggtactttgacctagctgtggaccctcagtttccacatctgtattcaagggataccaccaccatttctctttttttctttcttccttttttttttttttttttttttttgagacggagtttcactcttgtcgcccaggctggagtgcaacggccaatctcggctcactgcaacctctgcctcttgggttcaagcaattctcctgcctcagcctcctgagtagctgggattacaggcacccaccaccatgccccgctaatttttgtattaatttttagcagagacggggttttgccatgttggtcagtctggtctcgaactcctgaccttgggtaatccaccctcctcggcctcccaaagtgctgggattacaggcgtgggccactgtgcctggccactaccaccaatgtcacagcactgttgtgaagatgattgtaggctcagtccagacacaaagaaagctgtcagttaacagttgctgttgtacgggtgtggtggctcacacctataatcccagcactttggggggctgaggctggtggattgcttgagcccagaagttcaagagcagcctgggcaacatggtgaaaccccgtctttacaaaaaatacaaaaattagctgggtgtgatggcatgcgcctgtcgtcccagatacttcgggggctggggtgggaagatcacctgagcctgtgagagtgtggctgcaatgagctgagatcgcaccactgcactccagccagggtgagagtgagaccctacctcaaaaaaaaaaaaaaagttgctgttatcattagtgaagtcttggactgggggaagggaaataacctgatttgtggtctaaagtcctcctttccccctaggcagaaagaggaccactttgctctcctgccctctgggggtggaggataccctcagcctgcatggtaattccattttggtcagaaaacctccagagagcaggcagttctgcactgtgcgggttggctgagggtttccaggactattggggaagcaggctgacatttactgaatgcctactctgtgccaggtactgtgctagacagcaccggactggaggctttagtgtgaccttactaagtgctgggtcttgggagagaacaatgaacaagataaggtccctggccatacagagcttacattctagtgtgggagaaaggctggaaaccagtaaaccagcacataaacctgaaggattttatttgcaccttataactcccatgttatattttcttttttgttttttttgttttttttttttttgagacggagtttcactcttgttgcccaggctggagtgcaatgatgcgatcttggctcactgcaacctctgcctctggggttcaagcgattcttgtgcctcagccttctgagtaactaggattacaggcatgcaccaccatgctcggctaattttgtatttttagtagaatttttactagagacagggtttcaccctgttggtcaggctggtctcaaactcctgaccttaggtgatccacccgcctcggcctcccaaagtgctgggattacaggcgtgagccaccgtgcccagcattttttttttttttttttttgagatgcagtctcactctgtcacccagcctggagtgcagtgagtggcacgatctcggctcactgcaacctccacctcctggattcaagcgattctcctgcctcagtctcctgagtagctgggattacaggcgcccgccaccatgcccggctaattttttgtatttttagtagagatggggtttcgccatgttggccaggctggtcttgaacacctgacctgaggtgatccacctgccttagcctcccaaagtgctgggattacaggtgtgagctacagcgcccaatcctctgttatatttccttcttcttcttcctcctcctcctcttcttcttcttccttcttccttcttcttcttcttcttctcttttcttttcttttcttttctttctttcttttttttttttgagacggagtctcactcactctgttgcccaggttggagtgtagtggtgtgatcttggctcactgcaacctcctcctcctgggttcaagcaattcttgtgcctcagcctcctgagtagctaggattacaggcgtgcaccaccatacctggctaatttatttatttatttgagagagagtcttgctctattgcctaggcttgagggcagtggcaaaatctcggctcactgcaacctctgcctcccgggttcaagcaattatcctgcctcacctttctgtgtcctggctaatttttgtatttttttagtagagacaaggtttcaccatgttggtcaggctggtctcaaactgctgacctcaagtgatccccagccttggcctcccacagtgctgggattacaggtgtgagccactgtgcctggccattttcttcatttttacgggtgagattccaagggtcactcatcaaataaatggcagtcaggatctgaatcctgctctgttgggatccaaagctggcgacacagcctagcggcccctgcagaggagaagaggagcaatgctcctctcctgcaaaggagatgcccaagcgatgtgaattgaaaacctggtgtttcttcccacttctgccctcaccctagctatgccactgctgccagggccacttttggtgcatcagcctctgggtctcttgggtgccaaagggccctactaatcatcctgacctatgcactccatgaggcgagcacccacttcttccatcctccaggtacatttatctcctgcagactttcagggctgctaggggtcctggccatctgtggaaggcatgataggaagaatatgagctttggagtcaggtctgggttcaaatcccagttctccacttatagctgtgtttccttgaacaagtaacctaacccgtctgagcctcagttgactcatctgtaaaatgagtacagtgatatgaaaatggctgagaggacccagtgagctgatgtgtgagcactgtggagtcctgtgcccatatgaggcatggttatatctgcccatgattgttacaggctggggcttcccagcagtatggatgaccaagcccggtgggacatctccttcttggaggcagtttcttctgactcagcctaagtcagtggcctcatagtttcatttcacgttttttcaagttctaatattacctcaggttgctgttgtcttgcagtttatgatccacaatggaaacctccgtgtgaaggccaagttcgaagccagagtcccagctttctactacatcccccaggccaacgactgcctgtgagtgggtgattccttagggactgggtgaggggtctgtcctggttccacctcctccccctctccatctttggtgtcttcatctgtggtggtctcttctatgggcctggtgcgcaggtggatccaggaaagcactggataccatcacagagagcacatgggaagactggtataagcctctttctgcctctgttgcttgggcgtgtctcttcctttctctgggcctcagtttccacagctcttaaatggaggatttttctgtatgatctctatgatttttctctatgatctctgcctgtgacattcttgtagcttacagatggtggctaacttgataagagggggtaaacactagtatcttactagaccaagtgtgtttcagctacttcctttagagaaatatgtctagagctggccaggcacggtggctcaggcctgtaatcccagcactttgggaagccgaagcgggcagatcacgaggtcaggggatcgagaccattctggctaacacggtgaaagcctgtctctactaaaaatacaaaaaaaatttagccgggcgtggtggcgggcactggagtcccagctacttggaaggctgaggcaggagaagggtgtgaacccgggaggcagagcttgcagtgagccaagatggcgccactgcactccagcctgggcaacacagcgagactccggctcaaaaaaaaaaaaaaataaaagatagaaatatgtctagggctctgccacctaagctcgggctggctctaaacaacttgcctgagctgcagatccctaaatactaaccataaaaataagaataacagccaggcacaatggccagtgcctgtaatcctagcactttgggaggctgaggtgggaggatcgcttgaagataggagttcaatgtcagcctgagcaacatagcaagaccctgtctctacaaaaaataaaataaaatgaacttagccagggcatagtagcacgtgcctgtagtctgagctactaggaagactgaagtgggtggattgcttgagcccagattgcagtgagctaggatcacatgtgtcactgcactctagtatgagtgacagagtgagacctagcattagaaaaaaaaaaaaagtagctactggctggatgcggtggctcatgcctgtagtcccagctactcaggaggctaaggcatgagaattgtttgaacccggaggcagagggtgcattgagccaagatcacgccactgcactccagcctgggcaacagaaggagactgtctcaaaaaaaaaaaaaaaaaaaaaaaggccggatgtggcggctcacacctgtaatcctagcaatttgggaggccgaggcgggcggatcactcgaggccaggagttcaagaccagcccggccaacatagtgaaaccccgtctctactaaaaattaaaaaattagctgggcatggtggtacatgcctgtagtcccagctactcgagaggctgagggaggagaatcgcttgaacccgagaggtggaggttgcagagattgcaccactgcactccagcttgggcaacagagtgagactttgtctcaaaaaaaaaattgctactaatattattgagctttgcttaagtactacgccctgtgcaaaatgcttatgtgcatgtatttatttaattctttcaacaaccctacaagtactgctactatccctatgctatagatgaaaaaacctgaggtttgtggaggcaatactggtctagcctgtctgacaccagggccagggtgactgtttcatggaattgggataattttatataagaggggggctttgaagcagcaggagggttcaggtcccctggaggtgagggttagtgtggcactggtacctagtggccctggacctctgcagatctgactgcctgagcctacgactccttcccagggacttagactccccaccagggctgctagacagtatcttgtgtaaatggggagaaggaatccctttaggctgacccagcctcatagcgggtatgtctggcaaacagaaagcagctgcatttcagctgccgagcctcagcaaggtgcttttgggcagtacacagactatataaccatacctagtggtcttgtaatttctcagtgcttagacaattaagagctagtaatgtactctggagtggctggggaagcacagctttctacttggaagacctcagttttgtttcctagctctactgtgacctagctgggaggacgtgggcaagtcagcaaatctctctgattgtcaacatcctcatctctgaaatgtaggcaatgatgcctgcatcatagcatacttgtagagattacatgagataacttatgtagaacctttcacatgccacccgacacacgggtttgaatccatttcactgtgtctgcttcagaatgctacctgtccatggccagctgtggggtgtgctgactcgagagggcctgtctcatcctggctcgctgctgccactctgtcctttgctccaagtgctcagtgaacacgtgcgctgtgctaggcttcctgccggcactaaacagacattacccaccatgactccagcagcagccctgcactttaaccctttttgtctgagtactaatggccaccttcaggaccaacatgggtggcccttggtctccattccttctccctgctctgatcttgtgtcccagggtttccaccctcatggtgggccaggtgattctcctcagtgatctgtgggctgtgcactaggaatgactctctctctcttttttctttctttcttttttaaatatagagacaaggtttcactctgttgcccaggctagagttcagtggcacaatcatggctcactgcagccccaacctcctcggctcaagtgatcctcccacctcagcctcccaagtagctggaactacaggtgcatgccaccatgcctggttaatttttgtatttttgtttgtttttatttttgtagagatgaggtttcatcatgttgcccaggctggtctcaaactcctgagctgagctcaagccatctgcctgtgttggcctcccaaagtgctgggattacaggcatgagttaccatgcccagcctggactcttgattgtaagcgacagaaaccttatttatttatttatttatttatttatttatttatttatttttgtgacagagtcttgctctttcacccaggctggagtgcagtggcacaatctcagctgactgcaacctccacctcctgggttcaagcgattctcctgtttcagcttcccaagtagctgggattacaggcacgtgccaccatgcccagctaatttttgtatttttggtagagccggggttttgctatgttggccaggctggtcttgaactcctgacctcaagtgatctgcctgccttggcctcccaaagtgctaggattacaagtgtgagccactgcgcctggccagaagcccagtttaaaccagcattaaaaaaagaggattttatgggttctggggatcagactacctgaaggacagtggtggagctggcctcaggaaggaccaagccaggagctcacacaccatcaggtctctcatactctctctggctctctttcctctttctctcagacaggcttccttcacacagctggcagcaaggccacaagcaggtgccaggctataccttccagcgtgactctggagaaagctccatcaatctctccttcacttttgaccctctcagtccacacagcccagagcagcaaagagctctgaatgaccaggttgggccagatgcccagctctaggtcattcctgtggctatggggtaaggtcatatataccttggaacacttccctggaaaaggtgagcaggaaccaaacaattaaaataactccactctcggctgcatggtttttctgcaggactcacggatgacaatctctgattgagatcacattaaacacctactatgtgctgagtaggtgctaggccctttatatacatttaaacctctcaacaaccctgagggctaagtgagtataacaatagaggtctattccccaaattcagaggagttgggtaacttgctcatggtcacacagtggataaatgatagagtgagaccaggtcccaggtggtcagatcctaagacgactgctttgtccagtgtagcctgcccagacttcatgggcaggtacaggaagaggctcctggactctcctgcctaagctcatgaacacacagtgggagcaggtggtgtagatggtccagaggagccagtatctgtctcattgacctagagagctgatactgggattggaacaactcggtggttctcatatagcccactgggagaaatatttcccccagaggacatttggcaatgcctgaagacatttttgggtgccacaactggggagggggtgctactggcatctaatgggtagaggccagaaatgctgctaaacattctgtggagcatgggacaacccataagacaacagaacaaggaattatccaaccccgaatgttaacagtactgaggctgaggaatcctaggtagctggagcaggcagtgaggcactgctgtgatgttcccaccctcaactgcagggtcttggaaaagaatgcatcagtccaggcatggtggtaatcccagcactttgggaggctgaggcaggaggatcgcttgagccctggagttcaagaccagcttaggcaacatagggagacccccatctctacaaaaatttaaaaattagccaggtgtggtggtgcctgcctgtgatcccagctacttaagaggctgagatgggaggatcgcctgggcctaggaggtctaggctgcagtgagccgtgatcacgtgatcacaccactgcactccagcctgggcaacagagggagaccctgtctcaaaaaaaaaaaaaaaagagaatgcatcaaacgcagctgacctcaggctctctctttttagggtcttaaaggaacaatggattcgagctaagtatgagagacgggaatttatggctgatggggaaaccatctcgctcccaggtaaagttatttccatcaccttttgaaatctatgttttaatgagctctagaaaaaccaagtgcctaaatattaggagcaagatccatccaagagatgcctgctgttctcactgtggccgcagaggccaaggtgtgggttcttctgactttgaaataacaacacatcagctggtggggctttatgctctgagcagcagagaagctcagagcttctatggtctttgtctcaggtctttgcagggtcacaagtgtgtacagactcttttttttttttttttttttgagacagggtcttactctgttgtccagcctggagtgcagtggcactatcacagctcactgcagcttcaatctcccgggctcacatgatcctcccacctcagcctcccaactagctgggactacaggcacatgccaccatacctggctaattttagtggcttttatttttttatttttattttttgtagagatggggtttcaccatgttgcccaggctggtcttgaactcctgaactcaagtgatcctttcgctttggcctcccaaagtgctgagattacaggcatgagccactgtgcccagccagactctttttctttttcttcttcttcttttttttttttttgagacagagtcttgctcttgttgcccagggtggagtgcagtagcatgatctcagctcagtgcagcctctgcctcctgggttccagcgattctcctgcctcagcctcctgagtagctgggattacagcatcatgcttggctaatttttgtatttttagtaaagacggggttttaccatgttggccaggctggtctcgaactcctgacctcatgatctgcccaccttagcctcccaaagttctgggactacaggcatgagccaccgcgcccagcatcaaacacttaatgtaaattgcagaaagactcctccactggacagaccaattaggaaaagatatccctgctcctggtgagctttattcctggtgcagctcaagacttggtgaggaggatgggcttaaattcagcctccctttcgaccattgtgcagggtacaacctcttctgtggccctggacctgtggcagtttcacccccacggtcctgagtccaagctgactctgacccagacagtaaagtataaaaaatcattcttagagggccagaggcagtgctcagctatcctggctaccaggaccacaaattattctatttatttatgtatttatttattgagtcagggtctcactctgttacccaggctggagtgcaatggcgtgaactcggctcactgcaacttccacatcccaggttcaagtgattctcatgcctcagtctcccgagtagctgggattacaggcatgcacaaccacacctggctaatgtttatatttttaggagagtcagggttttgccatgttggccaggctgatctcaaactcctgacttcaagtgatctgtctgccttggcttcccaaggtgtcaagattacaggtgtgagccattgcacccagcccataaattattcttcaaaccagcagatgcccggagggagtctcactgtgtcacccaggctggagtgcagtggcacaatctcggctcgctgcaacctccccctcccgggttcaagtgattctcctgtctcagcctcctgagtagctgggattacaggcacgcgccaccatgcccagctaatttttgtatttttagtagagacggggtttcaccatgttggtcaggctggtcttgaactcccgaccttgtgatctgcccgcctcggcctcccaaagtgctgggattacaggcgtgagccactgcgccctgccttacttctaaagtttcattaggttgatgtcagcatgaagttgggcaggaccatatgtatttagtatgtatttaagtgtctttcagaatcagtccagtttctcaggactttgccttcttaagggtcttcttatgagacagcctgatacacagaaagtcaaggaagaaaggttttaggcagtgggaagtgcccctgaagtgaaaagacatcacaaagttggccacagatgggatccttgtgttctgcagctgaaatagggaagtctgagtggagatactttggcagcagatggaaggcttattccacccttgagaacctcagaggttcctgagctgcttgtgatcttaaggtcacgtgtgttcacgctttgtcatccttgctgcttaaggtaaccgagaaggattcctgtggaagcgaggaagggacaactcacagtttctgagaaggaagtttgtacttctggcaagagaaggcctcctgaagtacttcacaaaggaacaggtaagatgccagaccaatgagagcaggtcccttcctgagcactctcacccgactaaggtctacattctaatcagtggtgcccttttcttgtagataatctcagcccctgagagttaggcacaacatttggctacttttccttggctatacagtaaatccagtccaccaaaaatcatactttctgtccacctagaatcagcttagataggtccatgtttaagcctttgatgaccacttggttttgcttcatttattcattcacttaagaaacatttattgagtacctactgtgtgctagacattattccaggcactgaggatacagcagggaactaaacaaaactcttgttctcagggagctttcagtctagtgaaaggaaagagctccgtaatcaaaacatcaatatataatataccaggaggcaatagttttataaagtaaaatagaagtggctgcgcacagtagctcacacctataatcccagcactttagtaagagattgaggcagggggattgcttgagttcagaagtttgagatcagcctgggcaacatggtgaagccccatctctacaaaaaatacaaaaattagctgggtcaagcacatacacctttgtatggtggcacatgcctgtagtcccagctactagggagtctgaggtgggagaactgcttgagcatgggaggtcgaggctgcattgagccgagattgtgccactgtactctagcatgggtgacagagtgagaccctgtctcaaaaaacaaaacaaaacaaaaacaaaaacaaaaaccgggcatggtggctcatgcctgtaatcccagcactttgggaggccaaggcaggtggatcacttgaggtcgggagtttgagaccagcctgaccaacatggagaaaccccatctctactaaaaaaatataaaattagctgggcgtggtggtgcatgcctgtaatcccagctactcgggagactgaggcaggagtatcacttgaacctgggaggtggaggttgtggtgagctgagatcgtgccattgcactccagcctgggcaacaagagtgaaactccgtctcaagaaaaaaagaagtaaaatagcggagagtgagaagatagacaacaatgagagtgtgttagggagtcagggagtgctgctgcagagtgatcagggaaggcctctctggtgacatttgagcagataactgaacaaatgtgagcactgagttacatggctatgtggggggaagaatagaagaaaggggaggaacagtatgtgcagaagccctgagcacaggtatggtcaaacacatacacctttgtaccgatttgagaaagatgatccctttaagagggtgcagcccctgggccccagtctcgaaaatcagaagcctggtttgcagttaccagtcagctaggagctttttatgcagtgcacaaacgacttaaccataagctgcaaccctggccctgagctagaagtgtgtttggtgggtgtagggcatcaaggagggcagagcgacttgtgcagagtgagcaaggaaaagtgtggagggagatgaagtcacatggtggagggccttgtaggtcatagcaagacttgggatttcttttggtaacagtttattgagatacaattcacataccatataattcacccattaaaagtatgcagtcaattggcttttagtgtattcacagagtagcacaactatcaccacaattcagttaaaaactttaaacaccttatcccttagctgtaatcccccaccccaccccaccactagccctaggcaaccaacaacttactttctgtctctatggatttgcctaatctggttatttttattttattttactattttatcttatttatttttttagagacagagtcttcctctgttggccaggctggagtgcagtggtgcaatcatagctcactgcaaccttaaattactggcctcaagcactcctcctgctccggtctctcaaagcactgggattgcagatgcataccactccacccagctaatttttatttacttatttatttttgtagagatagggttttgctttgttgtctacgctgttctcaaactcctggcttcaagcaatcctctgcctcagcctcccaaagtactaggattatagatgtgagccactacgccaggcccatatctgtcttttttataatagccgtcttcatgggtatgaagtcgtatctcattgtggttttgattggcgtttcccacatggcaaatgatgttgagcatctttttaatgtgcttattggccatttgtatatcttatttgtagaaatgtctattcagatcctttcccatattggccgggcgcggtggctcacgcctgtaatcccagcactttgggaggccgaggtgggcagatcaggagttcaggagatggagaccatcttggctaacacagatactttccccatattttaattaggttatttgtctttttattattaagttgtaatagttctgtatatattctagatacaagtcacttatacatgtaggatttgcaaaaatttgagcttttggattttactgagtgagatgggaagaaattggaggattttgagctgagaagtgatattatttgacttaagtttttgattgattgattgatttgagatggaggctcactctgtcacctaggctggagtgcagtggcgtgatctcggctcactgcaacctctgcctcccaggttcaagcaattctttgcctcagtctctcgagtagctgggattacaggcgcgcaccaccatgcctggctagtttttgtatttttagtagacagggttccaccatcttggccaggctggtcttgaatttccgacctcgtgatccacccacctcaccctcccaaagtgctgggattacaggcgtgagccaccgcgcccggcctatttatttattttttgagatgggatttcactctattgctcaggttgaagtgcaatggtgtgatctcggctcactgcaacctccacctcccgggttcaagtgattcccctgcctcagcctccccagtagctgggactacaggcgtgcaccaccacacccggctaatttttgtatttttagtagagacagggtttcaccatgttgaccaggctgatttagaactcctaacctcatgtgatctgcccacctcagcctcccaaaatgctgggattataggcatgagccactgcgcccagcctgacttaagcttttaaaaagcagcacgctggctgctgctagggtgagtagggaggaaggaggccagagcagaggcagagaaattagtcaggaagctgttgcaataacccaagtgaagaagaatggtggatccgaccaggatggttagaagtggtcagattctggatatattttggaagtagaggcaatagaatttattgaaggattggatgtggggtgtgagagtaagaggaatcaaggatgattcccagatttttgctctataaaactacaagaatagatttgctatttactaaggtggcaaagacttagacccctaaggggatgctcaaaagtcctttttattttgagatgcctatgagtcatccagtagagacatggggaaagaagttggatgtatgtttcctgaattctaaacccaagtggcagaagttggatgtctgatttggaggcttggagagagtttggaactggagtcgtcagcatgtagactggtttagtaatgggactggctaggatcacctaagcaggaaaaaggtgttcaaggactgagtattttggttatgtgttgctgagtaacaaaccatcctaaaacttaatggcttaaaatatcaatttactatttctcacaatcctatgggtcaggaatttgaggaggcctcggctgttctggtgtactccatgtggcatcagctgggctactctgctgcccttagctggccagagacccaaagaagctttcactcatgtctggtgccttggtgtactctatatgggggctctgtctttctcattcaggagtctagcttaagctttcttgtggcttggctgctgacttccctaaacaaaagcaaatgctaccagacctctggaaggctaaccaggagctgcattctgttggtcaaagcaagtcatgcaacaagccctgattcaaggggaggggaaatagattcaacctcttcatggatagagggtcacgtatacactgggagggaaagactgggtgagcgccatctttggagaccatctaccccattgagccctggggcattccagtatttaaaggacagaaagataagaagttttcagcaaagagaatgtgaaattgtggccaacaaagtaagagaaggataagctctgagcactttagccttcaccttactctatttcctatatgtagaattattatatattccccctgttgcttttctaggcagaccagagcaatgctaaaaggtctgtctatggggaggagaagggaggatgaagagaagtgggttaaagggtacaaacattgtaagatgcaaggaataaattcaatatttgataccagagtggggtaactatgcttaacaaaaatactctggtgaccaacaccctaaatatcctggcttgatcactacacattatatacatgtagcgaaatttcacatgtaccccataaatttgtataaataataatataaaaggtctgtccaatgtggccacagtctgggaccaagtaaaaagtgttaagggatgaagaatctttaccctccaagttagaggaagaattttttcccagtcttcaatgtaaagcactgaaaaatgtggctttttcaacatttttgctgaaatggtacaaaaggccggaagagaaagcgctactgcagttaggaaaggtcaccaaaccccagcagctgctgcgagttggtctctcggacagggcctcatcattggttgaaaaaagttgatctgtttttcagtcctacgccagttcagtctagaatagtccaaaaatagaatgggctccctatgttcttttttatttatttcccaaagtggatattttaaaatcataaaggtaactaatttttaggtaaaacttttgggtaatacaaaaaaggaaatgaagtataaagaaagtgaaactgaaaaaaaaaaaaaaaagccccaagctctatacaaagcacttcaaaaagttcttggaggccaggctcggaggctcacacctgaaatcccagcactttgggaggccgaggcaggcagatcacgaggtcaggagattgagaccatcttggctaacacggtgaaatcccgtctctactaaaaatacaaaaacttagctgggcgtggtggcaggcgcctgtagtcgcagatactcaggaggctgaggcaggagaatggcccgaacctgggaggcggagcttgcagtgagccgagatggcgccactgcactccagcctgggcgaaagagcaaaattccatttccaaaaaaaaaaaaaaaaaaggtattggacaaatgagattaaaattaaagatataaactttatttctcaacataagctccatcaaggtcaagacacttttataagtgatgacaccagccatttagtccatcccctagcaattgagggtcctgggaatttaaccatgccaatgcagtcttttttacattttgtttttttatgctgttttctgagacagggtcttgctctttcaccaaggctggagtacagtggtgcaattctagctcactgcagccacaacctcccaggctcaagcgctccttccacctcagcctcccgagtagctgagacttcaggcacacaccaccatgcctggctaatttttgtattttttggcaacgacaggatttcatcatgttgcccaggttggtcttgaactcctgaactcaaccgatctaccagcctcagtctcccaaagtgctaggataacagacataagtcaccacgcctggcctttttttttacactattaactgaagaaagatgggtaccctttacagattttttttttttcgagatggagtctcgcttcatcgcccaggctggagtacagtggcacgatctcggctcactgcaaccttcgcctcccaggttcaagtgattgtcctgcctcagcctccccaggagctgggattacaggcgttggccaccatgctgggctaatttttgtatttttagtagagacggggtttcaccatgttggccaggctggtctcgaactcctgacctcaagtgattcgcccgccttggtctctgaaagtgctgggattacaggcgtgagccaccatgcccggcctcctttacagattttttaagattagaaaacaaaaagaagttagaaggagccgaatttggactgtaagatgatgcataatcacttcccattgaaactctcacaaaattgcccttgtttgatgagagaaatgtagttgaagcattgtcctgggggagaaggactctctggtgaagttttctcagatgtttttctgctgaagctttggctaactttctcaaaacactctcataatgagcagatgttattgttctttggccctctagaaagtcaacaagcaaaataccttgagcatctcccagaaaactttaccatggcctttgttcttgactggtctgcttttgctatgacaggaccacttcaacctctcggtagccattgctttgattatgctttgtcttcaggatcatactggtaaagccatgtttcatctcctgttacagttcttcaaagaactgcctcaggatcttgatctcacttgtttaaaatttccattgaaagctctgctcttgtctgcaactgatctgggtgcaatggcattggtacccattgagtggaaagtttgcccagctttaatttttcagtcagatttgtgtgagctgcaccaattgaggtatctgtggtgttagctattgtttgtgctgttaattattgcttctcttcaattagggcatgaacaagatgatttttttcattgtaaattgatgtagatggtctgctgctgcaggcgccatcttcaacatcatcttgtccctccttaacaagttatccatttgtaaactgctaattttgttggggatttgtccccgtaaacttttctgaaagcaccagtgatttcaccattcttccatccaagcttcaccataaatgttgatgtttgttcttgcttcaattttagcagaattcatgttgctctgagaggggctgttttcaagttgatgtcgtatccttcttagtgcctcaaacaaaatcccactcagacatgttataacaagttagtatgagtttattttggtgcaaaacaatttgaaatccatgcatagctttttcatactatgtgttttccatgaacttttctaagtcaccttgtataagagtattatatgatctcatttatatgaaattttagaacaggcaaaactgtactgatagaagacaaataagtggttatctggtgttggaatggggtagagattctgcgaagggggatgagtgaagtcttttggggtgacatttaggatgataagtaatgttttatatcttgattgttgtggttacatgggtatatacatttgtcaaaaatcaaactattttttttttttcgagatggagtcttgctctgtcaccaggctggagtgcagtggtgcgatcttggctcactgcagcctccgcctcctggggtcaagcgattctccttcctcaccctcactagtagctgggactacaggtgtgtaccaccactcccagctaatttttgtatttttagtagagacaggatttcaccatgttggccaggatggtctcgatctctcaacctcgtgatccacctgcctcggcctcccaaagtgctgggataacaggtgtgagccacagtgcccggcccaaacttaatacgggtacactttattgtttctaaactacacctcaataaatgttgattaagtgaaaattaacaatgagatacaattccatacccatcatattggcaaaaattttgtaatctggtagtgtcaagtgttggtgagtatatggggaaaggggaactattctatttcattgatggaagtaaatattggtacaatcactgttgagccattcagcagaataatttggcagtctctagtaagtgaagatgtatataactgtgatccagcaattccatttctaagcatacgctgtgacctacagatgcactcacatatgtgtaccagatgcacaaactgactgcaacattacttatgatagcaaaaaatcaggaacaatctcaatatatatatcggaacaatctattaacagaaaatagattgataacttttggtatagtcatttacaagagcaaactagactggtgtatctcagcatgggtagacctcaaaaatataatgttgaaagcaaaaagaacctcattaaaatgggcaaaagatgtgtacagacacttctcaaagaagacatacacgtggccaacaagcaaatgaaaaaatgctcaacatcactaatcagagaaatgtaagtcaaaaccacaatgagataccatctataccagtcagaatgactgttatcaaaaagtaaaaaagtaacagatactggtgaggttgtggagaaaagggaatgtttacacacttgtggcaggaatgtaaattagttcagccacggtagaaagcagtttggagatttctcaaagaacttaaaacagaactaacatttgacccagcaatcccattactgggtatatacccaaagcaatagaaataattctactataggccggatgcagtggctcacgcctgtaatcccagcactttggaaggcagaggccggcggatcacctgaggtcgggagttcgagatcagcctgaccaacatggagaaaccctgtctctactaaaaatacaaaattagccaggcgtggtggcgtatccctgtaatcccagcaacttgggaggctgaggcagaagaatcgcttgaacccaggaggtggaggttgcagtgagctgagatcactccattgtactccagcctgggcaacaagagtgaaactcagtctgaaaaaaaaaaaggaaagaaagaaaagaaaaaagaaagaattctactgtaaagacacatgtacatgtattttcatcgcagcactatttacaatagcaaaaacatggaatcggcccagatgcccatcaatggtggactggataatggaaatgtggtacataaacatcatagaatactacacagccataaaaaagaatgagattggctgggcacagtggctcatgcttgtaatcccagaactttgggaggccgaggcaggtggatcacgaggtcaggagttcaagaacagcctgaccaacatggtcaaaccccatctctactaaaaatacaaaaattagccaggcatggcggcacgtgtctgtaatcccagctactcaggaggctgaggcaggagaatggttagaatctgggaggcagaggttgcagtgacctcagatcacgccattgcacttcagcctggacaacagagcaagactctatctcaaaaataaataaataaataaataaataaataaataaataaataaataaataagaaccagattggccgggggcggtggctcatgcctgtaatcccagcactttgggaggccgaggcgggcagatcacctgaggtcaggagtttgagaccagcccggctaacatggtgaaaccccgtttctactaaaaatacaaaaaattagctgggtgtggtggcacacgtctgtaatcccagctactcgagaggctgaggcaggagaatcgcttgaacctgggaggcggagtttgcagtgagccgagatcacgccgttgcactccagctgggcagcaagagcaaaacaaaacaaaaataaaaacaaagaaaagaatgagatcatgttctctcagcaacgtggattgatctggagaacattatcttaagtaactaacaaaggaacagaaaaccaaatgttctaacatataaatggaagctaaacattgagtacacatggacacaaagaagggaacgataggctgggctcagtggctcatgcctataatcccagcactttggtaggccaaggcaggtggatcacctgaggtcaggagttcatgagcagcctggccaacatagcgaaactctgtctctacttaaaaatacaaaaattagccaggtgtggtggctagagtgcagtggcacgatctcagctcactgcaacctccacctcccaggttcaaaccactctcctgcctcagtcttccgagttgttgggattacaggtgtctaccaccacgcccagctaatttttgtatttttagtagagacggggttttaccaagttggccaggctggtttcaaactcctgaccataggtgatccacccacctcagcctcccaaagtgctgggattacaggcgtaagccactgcgtccggccagtatctgaatttcgatatgagagcaagaacatttaaaacccatatatttacagattgatgcttgtttgcatgaaggccttggtgaaggttgaccagaagtcaccctgtggactgtcagcgtctttctttctctttctctctttcagggtaaaagccccaaagctgtcatcagcattaaggacttgaatgccaccttccagacagagaagatagggcacccccatgggctgcagatcacctacaggagagatggccacaccaggaacctgtttgtgtatcatgaaagtgggaaggtgagatgcctggagttgccacctccgcctccagctcgcaccccaggacttggcaggtgcagctcaccacctcccctgctcactggtgctgtgctcagctgcctcttgagattttctgctaccatttgccttaatctatcattgcctcccagtctgagataaagatatgaggagggcagggtgagatcagggagaggaacctggcaagtaccatggctatatctggacagtgcacagccaccaatgaaagtccagttacagaagggactatgcccagggatgcaaagccaggtagggccagaggttctgaatacgggggaggaactgatggacagtcaggcagcagtgcaccccgggaccctgcttctcaacatgtggtcctggcccaacagcattggcatcacccaggagctcaaggctgagcatggtagctcctgcctgtaatcccagaactttgggaagccaaggcaggtggatcacttgaacccaggagttcgagaccagcctggtagcatagtaagacccccatctttacccaaaaatacctccaaaattagctaagcatggtggcatgcacctgtagtcccaactacttgggaggctgaggtgagaggatcgcttgagcctgggaggtcgaggctgcagtgagccatgatcatgccactgcactccaagcctgggtgacagagcaggaccctgtctcaaaaaacaaaacaaaacaaaacaaaccagaaagaaagaaagaaaaatagagtctgaggcccaccctggagctaccaaattagaaactgcattaaaaaaaaaaaaaaaaaagaagaggccgggcgcggtggctcacgcctgtaatcccagcactttgggaggccgaggcaggcggatcacgaggtcaggagatcgagaccatgctgtctaacacggtgaaaccccgtctctactaaaaatacaaaaaaaattggccgggcatggtggcaggtgcctgtagtcccagctactcaggaggcggaggcaggagaatggcgtgaacccaggaggcagagcttgcagtgagccgagatggcgccactgcactccagcctgggtgacagagtaagactccacctcaaaaaaacaaaaaaaacaaaaaaactgcattgtaacgggatcccaggtgagtcttgtgcacattaaagtttgagaagcactattttttttcctttggagatggaatcttgctctattgcccagactggagtgcagtggcgtgatctcggctcactgcaacctccaccttcagggttcaagcgatcctcttgcctcagcctcccgagtggctgagatcacacccagctaatttttttgtatttttagtagacacagagtttcactatgttggccaggctggtcttgaattcctgacctcaagtgatctgcccaccttggcctcccaaagtgctgggattacaggggtgagctactgcgcccggctgagaagcactatttaatagtccaggaaatctgcccagtcagagatgaataagccaatataacagaataagctgggtcaggtcctgagcagggtcacataactaggcaggggacagagatgctgagtgggggtggatgaaggtgggtgctgacattttgtgaccatctattaactcccctgggcactgcttttggtgattgctgtccatcatttcttaatcctgaaaacaagccccacattattgagtcacggacatgttagtaacttgctcagggtcacagccctgcacccactttacctgccatgtgcctctgctgtaggaaggacacttggcagcaggagccaggaaccagatgcagggactagaccttcctaaggggcccctagcaccatggccctagccccctctccatgccaatcactgccataaggacttttactgaggcacccaaggtctctggcacttaggatacccagctccctcctatctgcccagtatggtgcatctgacaacctgggtctggccattcttctcttttgcttgatgccccagcctgtctgttagatgggcataaatgagggctccagattcctgcctgcaggagtcagggggtgatttaaaagctaaatggacaggcataagggatggggagggggctgtggcaaacaggaaaacctgcatggaggattgaaacaaacaaaactttaggagcaaacagacatgtatgcaggttggatttggcaccaggatcaccagattatgactggagagaccttccaaggtgaaggcctaggtgtgtcttttctggactggccccattcccttagtgtctgagacctaaggtttttttttgagacagagtctcgctctgtcacccagactggagtgcagtggtgcaatctcggctcactgcaacctccacctcccaggttaaagcaattctccagcctcagcctcttgagtagctgagattacaggcatgtaccaccatacccggctaattttgtatttttagtagagatggggtttcaccatgttggtcaggctggtctcaaattcctgacctcaggtgatccacccgcctcggcctcccagagtgttgggattacaggcgtgagccactgcacctggccagagggtccttaatgaaccccaggacaagagagcacagatccctggaatactaggcctgtgtgcttcgcctatgagagagaaagagaaatggtttcattccttttaaaccatattcagatgactttctcaatcaccacattatatcaaagtcacaaactaccactatttgaacaagcctttagcctcccaattccaaattcctgggagaaggaatctgataagcccagtccagcctctgtgttgctccaggcctggtccagttgctgtggttaagcaggggcaggatcacagcagtaaatggggctgcaactggggttgggtgaagataggcggggtagttctcacagaagcagggcttgggctgagcaagcaccaaaaatctatctattacaacatcaaaactaacctgcgggataagtggaatgttttgcgtaaaaggtgtgtgtgggatggagcgggctaagcagaatgtcccgagaggaaggaacagtaggtgttgggagaattgcaaatagttttgcatggaaggagctcagacagcaaaatcatagtaaagaacttaagacttttttttctgagggtagtagacaggactccaagccagactgattagatttgtaattagaaaatcactctggctacaggctgggcgctgtggctcacgcctgtaatcccagcactttgggaggccgaggcgggcagatcacgagaccatcctggctaacgtggtgaaaccctgtcactactaaaaatacaaaaaaaaaaaaaattagccgtgtggtggtgggcgcctgtagtcccagctactcgggaggctgaggcaggagaatggtgtgaacccagaaggcggaggttgcagtgagccaagatcgcaccactgcacactctagcctcggcgacagcatgagactccatctaaaaaaaaataaataaaggaaaatcactcaggctgccatgagagggccagtcagagagcagctgatcaaggccagctagatacatggttgtctatgtgggagatgaaggtggcccaggctgctgagggacatgttctctcagagtgacagcagaaggggccaagccagctttggcctaagttgccatgagcatcctcattagaggagcatccccaggcataactgctccccacccaaatgccaatctttgacatctgaggacaatgatttcctagagccttgctccttagagtgcattccactgactagcagcatcatatcacctgagagcgtgttaggaatgcagagtcttgggccccattccaaacctactggatatgcctctgcattttaacaagagcctcaggtgattttgcacgcattagaaggtgaaaagcactgtccgaggccattgcagaactcccatgcagttcactcaatccttttccagggctctggggttatccctgtcagaggcttcctgcttgcccgggttagcccacgaggctctgacacaatcctccctggatgcccctgagccgagctgtggggtgtgtgcaggtgctgaatatatgtgccccacacccaatgcccagctagcttcccgccaccagaggtagcttcccacccaccccatctcactgctgtgtgtgtgtcctgtgcacttctctccgcaggagatagtggactggttcaatgccctccgtgcagcccgtctgcagtacctaaaaatggcctttcctgaactcccagagtctgaggtgagctaaatgcggaccccaatttctgaatctcctcttggccatctccttctttccctgtctgttgacctcgaagacactcagaagccagactagggctgggcgcggtggctcacgcctgtaatcccagcactttgggaggctgaggcgggcggatcacaaggtcaggagatcgagaccatcctggctagcacggtgaaaccccgtctctactaaaaatacaaaaaaattagccaggtgtggtggcaggcgcctgtagtcccagctacttgggaggctgaggcaggagaatggtgttaacccgggaggcggagcttgcagtgagcccagatggcgccgctgcactccagcctgggtgacagagtgagactccgtctcaaaaaaaaaaaaaaaaaaaaagaagaagaagccagactagttttgtttgcaggcaagacctcgaggttgagggctgggctgctcagagggaagcccaaggcattctccaggggagcctgcgggggttacagcctcacatacgacaaggcggcctcccaaaagctggtcagtgtctccccttcagaagagtgtcaaggggctcagcaattggtcatctctttctgaacccttctccctctaaaatgtacaaatgatccctaacatactgcttacagagtgctttgagcccattttgtcttgtgaaatggcagccaggcaggggtgattatttccatttcactgatgagttatacagtcccaggaagggcaggtgaataaccaaaggtgtgcttccctttctaaaatcccctctttgccctgtgatgctctgggcttgggaaagcctgggatcctctccattacagttgtaacaggagcaggtatgcccttcatggccaacatcatggggagccgagaacttcattttgattgtctccagacttctggggccttcatctccctatctcaggctgggccagggagacccgcatggtgtagggcagaggatgctgtctcgagccaggaagcctgggctctcagggatgctctattgctcacttgctgtgtgacccctgcaggtcctggcacccctctgagcttctatttccatatgggtaagatggcggttagtccaggtcatcttcagggtcccttccgcctctgagattctatgctctggtcctcttcaagaggctcccctccaagaggattttataagtgatggggctggaaaaccattttaatgctgggattttcttaatctcaaccattagagtttccttgaaagcctaaatgctccttaattccaaggtttgtagggagccagttgtctggaatagggtcccctccaggcccagggatgtgctgagatggcagctctctgggagcaattccagcaaggcccgagtcagagcccttgagtcagtctgctgagtttgcacccagaactggttaatgctggctcccatgggcggggagtggagactgctgactgctgactatgaggagggaggacaaagtgcagatgctcagccttatttaatctgggcaagctgcccatctttgctgacatgtgtaaaggaaattgctctttggtcaacatcctcaatgttcccctgcctctctcatccactgtcggtacctgatatccatcccgtgtctttcctcccatttaatgtctgtgtatggtgtgaggttctgagcaatcaccaggcctggctcaagctttaggggtccacatgttggaaacccagggcatcccagtggggtctgtggtcctgtaataaatgcatatggtctcttggacttcagagaaagtaggttttgtcgccatggtgacagatgagtgcatcgaggctcagagaggtgaggtgacttgcctaggtgatagtacctactttctagggctattgtgagactccagcgagccaaggcatcagaagtacaggaagcagtgctccagccatgtgactttcctttttttcccaatggtttccctaggcctctgcttgctctgtgctggctcaaattccgaatattgagcagttcgggactccatctgttttctccaaatggaacaattaaagcctagtgaatgtattttaagagaaggggagtagtacagtttatatcttgtttcttacattaaaaatttttttttaattttttatagagatgatgtctcacttatgttgcccaggctggtctcgaacttctggcctcaagcaatcctcctacctcggcctcccaaagtgctgggattacaggtgtgagccactgcatctgaccaatattttcttttcttttctttttttttttttttttttgagacagagtctcgctctttcgcccaggccagagtgcagtggcgccatcttggctcactgcaagctccgcctcccaggttcacgccattctcctgcctcagcctcccgagtagctgggactacaggcgctcgccactgcacccggctacttttttgtatttttagtggagacggggtttcaccgtgttagccaggatggtctcgatctcctgacctcgtgatccacacgcctcggcctcccaaagtgctgggattacaggcgtgagccactgcgcctggcctaatattttcatttttggctcacaaatttcccccttttaaacttcccatagctgttccccagacctcacttcccctgtgcctctgccctgggccctggagctctggagaagcctctctgttctttgaagcctggactgtcatttgaagctctagactttccaggttgatgcctaggagcataggaggccatcatcaacccctggaaacatctctgggcgtaggctgccaggctggaagggatgctggggatcacatgatccaggctgtttatcacacaggggagacataaggcctcgagagacagaaggtcttaacaaaggtaatgcagctgatggaggccagaactggaattagaaccaggtctcccgacttctgcttcagaactttctctgtccactctggcatcattttcttttcttttttgttttgttttgttttgagatggagtctccctctgtcacccagactggagtgcagtggcactatctcagctcactgcaacctctgcctcccaagttcaagggattctcttgcctcagcctcctgagtagctgggattacaagcgcgtgccaccatgcccagctaatttttatatttttggtaaaggtggggtttcgccatgttggccaggctagtctcaaactcctggcctcaagtgatctgcctgccttgacctcccaaagtgctgggattacaggtgtgagccactgcacccagcctctggccattattttcttgttgcttggtgtcagaatcctgaccaggcctttcccaaggtcctgctcagagggccctggcatatttatactttagcacctagtgtagtggtaggagtacagtctagtgtcattggccctgggcctgaatctcagctctttgtgctaccagtgatgtgactttgggaaaatccccagccccttctctgtggcctggtttcttcagatgtgtaatgaggctggtgatacccacctcgcagggtgattgagaattgcacctggagcctgatgcaaagtggaccctcagaacatgttgcctgacaccaagagggtctctgcagagccttgcctatgtccacaccctggggttactgaaggaatccttaaaccaaaactcggccgtgccactaagctctgcaaacatctggggtgctgtcgactggctttgttgaaatattaatattatgaccattgcactttccaaatataatactgtgagccatgagcgtacatccttccccatttcaaacttcccctttgtcgggagccaagctcggcgggaacctggagccttggggtgtgagttgggggtcagtgtctgtctctcttccccagctcgtgccattcctcaccaggaactacctcaaacaaggcttcatggaaaagactgggccaaaggtaccttctatcactccctggggaacttaatatggtttaatgtatatagaaggtttcatgtgtttatgggatgattgttaagaggacagtgaaaggtgttaggccaagcttgtccaacccacagcccatgggccacatgcaacccaggacggcttggaatgatgcccaacagaaattcataaactttcttttttaaatttttttgagacagagtcttgctctgtcacccaggccagagtacagtggtgtgatctcggctcactgcaacctccgcctcccagattcaagcgattctcctgcctcagactcctgagtagctgggattacaggtgcccaccaccatgcccggctaatttttgtaattttagtagagatggggtttcaccatgttggccaggctggtctcgaactcctgacctcaagcgatctgcccacctcagcctcccaaagtgctgggattacaggcatgagccaccatgcccagccaaattcgtgaactttcttaaaacattatgagatatttttgcgattttttttttttggctcatcagctatcattagtgttagtgtattttatgtgtggcccaagacaattcttccaatgtggcccagggaaggcaagagattggatattcctgtgttaggcaatcatgaaagcaagccttgggcaggtggaaaaagcagtcaaagggttgttttcagagaggcgcagcccctccgcctggttcttgttgctgggctttctctccctgacctaggttagaatttggccaaggccagcactttcagccttgccaagcagtagccacttctgattttttccaacttcctttccggcttctttgtctacagcctgaaaaagaggaaggtgcctcttccaagttgaggcagcagggtgaagctggcaaagggtatggtggggttggaaggggaatgggcagaaccttcagagcctgagggctcctatccaggccccagggagaagcactaggatgtctgactgaggaggctgggctggagaaccagtgggactggccagctcctttggtttgggctgggctggcccctgacctctatcctcagaaactgacctggtcatctgtggtaagaagttccctcttttgcagcagaaagaacctttcaagaaaaggtggttcgccctggattgccatgagcggaggctgctctattacaagaacccactggtaagagccactcctgctccctccccagggcttcctcaaacattgctgggtggtgcttgtctggaactatgtgaaagctacagataaacacatctcccagagccccagagctagagaaaccttgagaggaaaacctctaccccttgtttttgtttctcttgagtaatctcctatggcatgaagcttctcctcgctttcaggaagtctattatgagtatccaaaatgctgcccatggtagttaaatatggtgtatctcttcctctagtctccagggctcacttctaaccaagaggccgtgatgtgtagtagttaggagtgtggtggactctagaaccccaccgtctgggctctggtctcagccctgccacttgtagtagtgttgccttgagccgtgtacttagtgctctgtgcctcggtttcctcctctgaaaaacaggcttaataagaatgccttccccagaggttgccatgatggttatttaagttactatatataaagcattgtaattcctgatgctgattttaataagtgctccgtaaatgttaggtatcacttatttttttttttttagagacagagtctctctctgtcacccaggctggaatgcagtggcacaatcacagctcattgcaaccttgaacttctgggcccaagttatcttcctgcctcagcctcctaagtagctcagaatacaggcatgcatcaccatgcccagctaattaaaaaaaaaaaatttagggctggatgtgctgccttttgtctgtaatcccagcactttgggaggctgagacaggaggatcgcttgagcccagaagttcgagaccagcctgtgcaacatagtgagatcccatctctacaagaaacttaaggccaggcacggtggctcacatctgtaaacccagcattttggaaggctgaggcggggcagatcacgagctcaggagttcgagactagcctaaccaacatggtgaaaccctgtctctactaaaaatacaaaaattagccggacgtggtggtgcgtgcctgtaagcccagctactcaggaggctgaggcaggagaatcgcttgaaaccgggaggcagagggtgcagagggtgcatgccattgcactccagcctgggtgcagagtgagactccgtctcaaaaaaaaaaaaagaaagaaaaaaaaagaaacttaaaaattagtcaggtgtggtggtgcatgcctgtagtcctagctgcttgggaggctgaggtgggaggattgcctgagcctgggaggttgaggctgggatgagccatgattgtgccactgcacttccagcctgggtgacagagtgaggccctgtctccaaaaacaattcataataataattaataatttttttttgtagagaaggggtctcactatgttgtcccggttggtctcatattcctggcctcaggcaatcctctgccttggcttcccaaagtgctaggattacaggcatgaactaccaggcccaccctcggtatcttttcaatagatgatgtgtatgatttattttagggttttgatctttcaaattctgggtcccacttagcagaaatcccagcagggacctcatacccctttcccaaaataaagcttggaggctgtcagggctgcagggcccctctgccctgggggcaccctctgatgaccctgtactctccattttcaggatgccttcgagcagggccaggtttttcttgggaacaaggagcagggatatgaagcctacgaagacctgcccaagggcatccgaggaaatcgctggaaagccggactcaccattgtcaccccagagcggagatttgtcctcacttgccccagtgagaaggaacagcaggaatggctggaaagtttgcggggtgtcctgtccagccccttgacgcccctcaaccggcttagtaagaagcaggaactgaggggtgttcttttggacaagggcagaggacagaaaattgcttcttcacttaggttcagctttgataccacaaaagattcctgattcctgactatgctcttttcattgtcttctcttcctgcaaaagaaaagcacagacatgccattattgccaaaaggtctcctctgtccactctgggttcccctaaccgagcccttccccaggagcttttagaggagtttggccctggcagaacccctgggtgctgtctgtaccccttgcggtgtgggggctaagcagcttctctttccctccaccgtgctctatgctgatcctttttctcgtgagaaaacgctggcctgttattattagctaaggtcacacccgctgggcagctcctgggatttttggattcctccccactccagagggaaggctatttctagtggcttcttttctttgagtcctcccttctgtctgcctctctcctgttcctcctctttaccagtagggcttcctcaatgctgacagccctgtgaaaaaaggggagacatgccgagctccggcaggaaactgctggcccaggacctggcttctggggcacaaaggagaatttctgtgtttggaaaagtacagactgagcaggtgacccccgcacagccccttgggggaaacacttgtgccctttgagtctgactgatataaacacagactctcttgactgtcccataaaggccaaagccagagaacctcagaaagggacttgcaaattgtgagtgaggcatatcagctggtgctttcttttctctgtgggctgccatttatgaatctcttggtttctctctgtctctgtccctccacttttctctcctttgctggtgtgtgcattccctctgacgccctggctctcactctttcattctgttttttattctggctccctctgtctttgtgtttttttttttaattttctttttttgaggtggggtcttgcactgtcacccaggctggagtgcagtggtgcgatctcagctcactgcaacctcttcttcctgggctcaggcaatcctctcacctcagcctcccaagtagctgggactacaggctcgtgacaccacatctagctaatttgttttgtatttttggtagagacagagtttcaccatgttgctcaggctggtctcgaactcctgagctcaagtgatccacctgcctcggcctcccaaagtgctgggattacaggcatgagccactgtgcccggccatggctccctctgtctttgtacgcctgtccctttgctgtccctctcctccacaggacagcattggcatggccacctccctcagccctcttcatttcccttgcagctgcatcaacagagagtggccgcagcagcaggtgacccattaactgaggaactggctgccactgaacacctggaactccttgtgggaagaagtttgcacctcggccctggctgcccaccatcagtgccccgcagtcagcagccattcctggcagtgaactctgccaggactgaagctgtggctttatccatcagctccctgggccttccccgcaacccacctcggggatctgaggatctggtgcatagatgaacatctatcccctcctcccccatacacacctaggcttgaaatgccctacaggcccagaactttctcacatctgaaatggaggcattgcaatgaaaaggcacccacagcatcatgcaagtggcatcttgtaaaaaaaaaaaaaaagtttaatctgaatctaaccatgaggaaataatcagacaaatccacattaggggcattctgctaaacatctgacccagactcttcaaaaatgaagagtgaaagataaagtagtcaatggccgggcgcagtgagattgcgccattgcattccagcctgggtgacagagcgagactccgtatcagaaagaaaaagaggaactgaatgaaatctcagatggctgaaatgttagagaaacagagcaccaagtcccctgctctgtgactcgttgttcctttcctctgtcttcaagcaccacgcagaaatacactggatgttctctctttgcttcaatggagacccaaggagctgggaggtctcttaagagactctctgattctccgtggctgggtgtgatggctcatgcccataatcccagccctttgggaagctgaggcaggaggattgagaccaggagttcgagaagagcctgggcaacatagtgagaccccatctctacaaagaaaaaaaaattagctggacatggtaatgaatgcctgtagtcccagctactccggacactgatgtgagaggatcacttgagccagggaggtcatggctacagtgacccctcattgcaccactttacttagcctgggtgacagagtgagaccctatctcaaaaaaaaaaaaaatctatgcattgtatgggactttcctttggatcccccaatcaaaggataagcaatgcgtaagcctgtgtccttcctgaagcttctcgactgcccagatagggaggtgagtcctctctatctcctctggctctggaagcaccttgaaaatgtgcattttcaaggacacttgctgggttgtgcattaagggccagtttacttgtctgcctctttgaccacctgtgaactctgttgggtgtactctgctaagttctggggatgaggaaattaataaaggtacagtcttgccttcaaggaacttatggtctagaggagaagaacgagaagtatagataggcagtaacaaagctacttgaagaggccaactgggattctaagggtgggaaagaacagacacaagagataaagtcctaatgaaatggagtgcttggttttggatgattccttcctcaaggaagagtatgcttctatactcttatattaaatccctttttccctttttggcttgttagtgcaaggaagtttctattacttgaatcagtcctgacagataaagttctctaaaagagatgatacctatgctgaatcctgaagaaagagtagaagatagttgggttggggtgggaggaggcagagaaagaagcatgtgtaaaggctcagagatatcaggtgtgcacgtgcctgtagtcctagctactggggagggtgaggtgggaagatcatttgagcccaggagttctgggctttagtgcacaatgctaattgggtgtccacactaaatttggcatcaacatggtgacctcccaggagtgaggaatcaccagtttgcctaaggaggggtgaactggcccagatcagaaatgaagcacttccgtgctggtcagtagagggatcatgcctgtgaacagccattgcactgcagcctgggcgacaagagggaaactccgtctaaaaaaagaaaatagctaggcatgggcactgtaatgcatgcctgtagtcccagctactcaggaggcagaggtgggaggcttgcttgggcctggggggttatgcactccagcctgggtgacagagtgagactccgtctccaaaaaaaaaaaaaagaaaaagaaaagaaaatttgaatcacacttcacttgtattagcgttctccagagaaacagaaccaatgatatacatatatatatatatggctatagaaagaaatttattggccgggcacggtggctcacgcctataatcctagcactttgggaggccgaggcaggcagatcatgaggtcaggagatcaagaccatcctggccaacatggtgaaaccccgtctctactaaaaatacaaaaattagctgactgtggtggcacgtgcctgtagtcccagctactcaggaagctgaggcaggagaatcgcttgaacccggcaggcggaggttgcagtgaaccaagattgcgccactgcactccagcctggcgacagagtgagactccgtctcaaaaaaagaaaaagaaaaagaaaaaaaaaaaagccaggcatggtggcatgtgcctgtagtcccagctactcaaggctgaactcccacttaagcctgagatttcaagactgcagtgagctatggtctcaccactgcactccagcctgggtgacagagtgagactctgcttcagcaaagaacagttatgtcacaccccaaaactcccttgtagccacacccttcccctgccccgtggcaaccattgatccgttcatcattatagattgtactttcaaaaatgccatataaatggaatcatttaatatgtaatttttattttattttattttattttattttatttattttattttatttttttttttttgagacagagtcttgctctgtcgcccaggctggagtgcagtggcgcaatctcggctcgctgcaagctccgcctcccgggttcacgccattctcctgcctcagcctcccgagtagctgggactacaggcgcccgccactatgcctggctaattttttgtatttttagtagagacagggtttcatcatgttagccaggagggtctcgatctcccaacctcgtgatccacctgcctcggcctcccaaagtgctgggattacaggcatgagccaccacgccaggcctgtaatttttaaagactggattctttcacagcacatgatacctttgagattcatcaaagtcactgcatgtgtcaatatgtctttccttattgctaagaagtattccactatatggctataccataccttgtttatccagtggaatgctgcttagcaataaaaaggaacaaattattcatacatacaacagtccccaggtatggggcttctggttcatactgatgcagggtaggtagtcaaggaagtaaccagggtctcaggacacagcaatcatgctgaccattcagtcaacacaataagcctcagcattcacaatgcaactgagctaattcaagcaaagctatctgcagtagggaatttcccatgtagacagcatgcaaactttgcggttcacctcccctcccctcctctcccctctcctctcctgtcctttcctttttctgagatggagtcttgctctgtcacccaggctggagtgcagtggtgtcatcccggctcactacaacctctgcctcccaggttcaagcaattcttctgcctcagcctcctgagtagctgggaccacaggcacatgccaccatgcccagctaatttttgtatttttctgtagagatgggatttcattatgttggccaggctgctctcaaactcccgacctcaggtgatccacccacctcagcctcccaaaatgctgggattacatgcgtgagccaccgcgcccggccctgacagcatgcacactttgattttacctggtctcaaactgaccctttgcttattttaatagtaaaaaatacacccctgggtggaaatttaagatggtaatgagacatgtggtgtatgaacaagcatgtaaactactgtgcatgtgcacccagaagaccacccagaacatgcttactagtaactcctctttccacttccttatgaataatcacataagactcccataaagggagtctccttagtgccagtttttgctgtctcatccttaaatgagcagcctaccctgaatcctctctctgagtgtgctgcccattctgcacttaattttcaaaatcctctttctcctttacaataaataactctatgctgcacttttttttttttcccgagatggagtctctctgtgtcgccaggctggagtgcagtagagtgatcttggctcactgaaacctctgactccctggttcaagcaattctcctgcctctgcctcccaagtagctgggattacaggcatgcaccatcacatccagctaatttttggtatttttagtagatatgaggtttcaccatgttggccaggatggtcttgaattcttgacctcatgatccacccacttcggcctcccaaagtgctgggattacaggcatgagccaccgcgcctggcctatgctgcacttcttttgctgtgtgtctcttgtttacatttttgttttttttgagatggagtctcgctctgttgcccaggctggagtgcagtggcacgatctcggctcactgcaagctccgcctcttgggttcatgccattctcctgcctcagcctcccgagtagctgggacacaggcgcctgctaccacgcccggctacttttttgtatttttagtagaggtggggtttcaccacgttacccaggatggtctcaatctccagaattcgtgatctgcctgcctgggcctcccaaagtgctgggattacaggcatgagccaccgtgtccggcctaaattcttttaaactaagaagacaagaaccagggtatcacaatagccatcaacatttggttagatatatgcttaattttataacaaactttcccggtggctgtactacttgacatttcactagtgatgtatgagagttccagttactctatcaccaacagttggtgttgtcagtattttttattttaactgttctgataggtatggagtggtattttattatggttctaatacgcatttccctagcggttgacaatgtcgaagtcctattatgtacttattggccaatcttatatcttctttgatgaagtgaccatttgattccctagcttttttttttttttttttttttgagatctggtcttgctatgttgcccaggttggagcacagtggctattcacagatatgaccatggcatactacatccacagacccctcacctcaagagatccttctgcctcagcctcctgagtagctggaactacaggcatgtgacacagtgccctgcttgcctttttaaaatattgggtggtttgggctgggcacagtggctcacacctgtaatcccagcactttgggaggctgaggtgggcagatcacgacgtcaggagatcgagaccatcctggctaacacggtgaaaccctgtctctactaaaaatacaacaaattagccgggtgtggttgtagtcccagctactcgggaggctgaagcaggagaatggcgtgaacccgggaggtggaggttgcagtgagccgagatcgcaccactgcacactccagcctgggtgacagagtgagactctgtctcaagaaaaaaaaaattgggtggtttgctttttctactgttgaattttgagagttcttcatatattctggatactaggaatacagacttggatttgtaaatattttcttccagtccatagtttttcattctgtaagagtgtcagtgaaggcttctttaatcaaggtattaaggttagggttcatgactttcttcgttttttgctgacttttgttgctgacaaagtttggcattaataatggggtgagaaaaaaatggggtgaggccagatgtgatggctcatgtctataatcccagcactttggaggccaagaagggaggatcacttgaggccaggagtttgagaccagcctggacagcatagcgttcaagatcttctctaccaaaaaagtttttaagcagtgttttggcttatgtttgggcatttgaatcatttattatgaagtggagtggaagtaagaataatggaaatttaatgatctcttccgtcccttgacaaaaagtgctttgtccctgaaagaatttagcaaaaacaggctgggctcggtggctcacgcctgtaatcctagcactttgggaggctgaggcaggcggatcacctgaggtcaggaatttgagaccagcctggccaacatggtgaaaccccgtctctacttaaaacacaaaaaattagctgggcgtggtggtatgcacctgtaatcccagctacttgggaggctgaggcaggagaatcgcttgaacccgggaggcaaatgttgcagtgagccgagatcgtgccattgcactccagcctggaggacaagagtgagacttcatctcaaaaaaaaaaaaaaaaaaaaaaaagaatttagtaaaaacaaagaaaagaaactgataggacatgttaggccgagcgtggtggttcatgcctgtaatcccagcactttggaaggctgaggcatgagaaccgcctaaacccaagaggcggagtttgcagtgaggcaagattgcgccagtgcactccagcctgggcaacagagggagactctgtctcaaaacaaacaaacaaaaacatgttaatggcagtgtgccttatttcatccagcacacaaactcaagcacctcatcatttcttatcttttttttttttttttagatggagtcttgctctgttgcccaggctcgagtacagtggtgcaatctcggctcactgcaacctccacctcctaggttcaagccattctcctcctcagcctcccaagtagctgggattacaggtgtgtgccaccgcaccgggctaatttttgtatttttagtagagatgaggtttcaccatgttggccaggctggtcttgaactcctggcctcaggtgatccgtcctcctcggcctctcaaaatgctgggattacaagcatgaggcattgctcctggctctgattttttaaatctaatttagcattagaacctagtgtcacagggatgggtgttaacacatgtacttgaatagaaaaatttcagggctggacgtggtgactcatgctgtaatcccagcactttgggaggctgagatgggagaattgcttgagtctgagagtttgagatcagcctgggcaacacggtaaaacctggcctctataaaaaatacaataacagggcatggtggcatgtgcttgtagtcccagctatttgtgggactgaagcgatggcttgagcctgggagctccaggctgcagtgagcagagatcacaccactgcattccagcctgggcaacaaagaccctgtctcaaaaaacaaaacaaacaaacaaaaaaacccaaaaatgtatatatatatgtatacatatatgtatgtgtgtatatatatttcaaatacataacataaaagcacctttccaaaaaatattagattgacaatggtgtattaaaataaacaatattctaattttcccagtcctttctgagtatatcagtaaacaagctgtctctaagttaaagtgtaattgcttttaattgatagtcatttgctaaaccttggcaaagtctttttggcatactgtaatcacccaacgggttcttcctgcccactgcacaggcaaaacagtaaagaaagagtttaattaacattaaggtgaggttggccatgtgggagaagtggaattatcagtcaaatcagtctccccaaaggctggaggttatggtttttcagtttggtgggcaggggactaggggatggatgctgctgattggttggggatgcagtcattacgggtgtggaaaatcgtcctcatgaactgagtccacctctggttgaggccacatggccaactgagtcacaagtcaccagtcctggtggcgtaagtctggaaaacatctccaccaatcttagattctacaatagtgatgttatctataggagcaattgaagaagccacaaatcttgtgacttctggctacataactcctgaaggtaagggattatagaaattgtgtcaacatctcagcagaattcaggcccctcccataaacttaattttgtggcctttcaatggttttacaaaggtggtttcagccccctgaataaggaaaggattagttttagggagggactattatcatcctggcttctaatttaaactataaactaaattccttccacggttagcttggcctaccccaggaatgagcgaagacagccagcctgtgaggctagcagcaagatggagtcagccacgttacaataacacccagaaaatgagaaagtgaatacttctttttttatttgatcttttttaatttatttttattttatttatttatttatttaatttttaagttttattttattatttttttattttattttatttttttatttatttttatgtatttatttatttatttttaaagtgaatacttctaacgacttttgtaacacaagtgtttcaaattcttttttttgtttttgagatggagtctcgctgtcgcccaggctggagtgcagtggcgcgatcttggctcactgcaggctctgcctcccagggttcacaccattctcctgcctcagcctcccgagtagctgagactacaggcgcccgccaccgtgcctggctaattttttttttttttttgtatttttagtagagacgcggtttcaccgtgtttgccaggatggtcttgatctcttgacctcgtgatccacacgcctcggcctcccaaagtgctgggattacaggtgtgagccaccgcgcccgacctcaaattcttgctttcaacaaaaattaaagaaaaatcaaatcaagttgttaattgagagattatcactatatgacttttttgcatatatctcaaaaagtattcaacaaaatgagtgacaattttgtcatctatttatacatgtgaacaagatttctcggcacacataaaaacataaaagaaatagaatttattgcaaaagtttgtctatcattaagtaatgttcattcatagataaatgcttctttttttgacagagtcttgctctgttgcccagactggagtgcagtggtgccatttcagctcactacaacctccgtctcctaagttcaagcaattctcctgcctcggcctctggagtagctgggacctcaggccaccatgcccagctaatttttgtattttttggtagaggcagggtttcaccaggttggccaggctggtttcaaactcctgacctcaagtgttccgctcaccttggcctctcaaagtgctgggattacagatgtgagccaccgtgcctgggcataaatgcatttttgaaagaaatgagcccatctgtcttattaatagctatcattccaataaaatgtttactgtctttaaaagttattttatttatataaaagttataaattgcagcatacttttcttttgtttgactgctaatagtaattatattgataattaaatccaggggaaaaaatttaccaagagcctttttgtcacaggaagttaagaagaattaaaaatttaatacacatacatacttttgttgtagagaagtattacaaagtgataaaagactttcatgcatgaaatatattgctttggaatgtaattctgtggaggaaatggaatggaaatacaagttcagaaagataaaagaatgacaaaatttctttttttttttttttgagacggagtcttgccctgttgccgaggctggagtgcaatggtgccatcttggctcatggcaaccttcacctcccgggttcaaatgattctcttgcctcagcctcctgagtagctgggattacaggtgcctgcaactacgcccagctaatttttttttgtatttttcgaactcctgacctcatgatccgcctgcctcggcctcccaaagtcctgggattacaggcatgagccaccgcactcggccaagaatgacaaaatgtctgatgtaggctgagcgcggtggctcacctctgtaatcctagcacttgggaggatgaggtgggcggatcacctgaggtcaggagttcgagacaagcctggccaacatggagaaaccctgtcaacatggggaaaccccatctctactaaaaatacaaaattagccgggcatggtggcgagcgcctgtaatctcagctactccggaggctgaggcaggagaatggtttgaacccgggaggtggaggttgcagtgagacgagattgtgccactccactccactccagcctgggcaacaaagtgagactccatctcaaaaaaaaaaaaaatctgatataaatgaagaatttgctaatatatttttactaccagagctgaccactctcccccttccccctttctttctttcttttttttttttcttttgagacagagtcttgctctgtcgcccaggctggagtgcagtggtgcgaactcagctcactgcaagctccgcctcctgggttcaggtcattctcctccctcagcctcctgagtagctgggactacaggctcccgccgtcacgcccggctaattttttttgtattttttagtagagacggggtttcaccgtgttagccagaatggtctcaatctcctgacctcatgatccgcccgcctcagcctcccaaagtgctgggattacaggcgtgagccactgcgcccggcccccacttccccctttcttataaccactgcatgattttgcataaaacttttagggcgtgtccaagaaaaaagtttgaaaactactggttaactcactctttccagaaacttggctgtgaaatggagaagaggagagctggttccagggaggctcaggtcaaaggtgattttattttattttttaatttttaatttttttgagactaggtctagctccttccccaggctggagtgaagtggtgtgatcacagctaaccacagtcttgacctcctgagatctcatggctcattacagcctccacctccctggctcaagcaatcctcccacctcagtctcctgagtagctgggatcacaggcctgcgctaccatgtctaggtagtttttgtattttttttgtagaggcaaggtttcaccatgttgctcaggcaggtctcgaactcctgagttcaggcaatccacctgcctcagcctcccaaagtgctgagattacaggcataagccaccacgccccgccagtgatttcattttttaagttggaagatctgagcatgtttaagtgtttagtatcatgcccgttttacagaaaaaaagaggctcttagaaactacgattttactccgatgcggagattctagaacaagatccaggtaatacatcagtcaggataggctaggttatgctgtagcagcacacacccactaaatctcagtaagctgaatacatcctagttttcttctccctcttactacgtatcctagggtgcgttggcagggagtctgctcatcttagccactcagtgacccaggtcaccggatgatggtttcatctccataattggggcagctggcagaaagggatacaatggccggctcagtcgcctttaaagctggtgggaagtaacatattacctctgtgtgtttcaagtgggtcagggaagtgccagtcctaccatgtgcccagaaagggaaagcactggaaacgttgatgagcagcgctgcctactccatgacacttccagtattagaaataaccacaaacgcttttttttctttcttttctttcttttttttctttttttttttttttttttttttgagacggagtctccctatgtcgcccaggctggagtgcagtggcgcagtcttggctcactgaaacctccgcctcccgggttcaagagattctcctgcctcagcctcccaagtagctgggattacaggcatgcgccagggcgcctggcttttcttttcttttctttttgtattttcagtagagatgagggttcaccatgttggccaggctggtcttgaactcctgacttcaagtgatccaaaggtcggctacaaacttgtattatctgatacctactttgagcccaggccagaaaggataaagtaaagcatgagacgttgttagttcatttcaacagattggggagttgtgggttttagtctctgacgcttcattgttaccatgagagcctgcaagtttttcttttttctcttttttttttttttaacctctttgggtcatctgggaggacgtggtgctcttttagctctaacattttctggttgcaatgcgtttaggactgggatgcgaagtgagtgagtgagtgagccttctcaggaaaacactttctagaattttgtccgagtgtctgttgggaaacgcgcttacatcccgcagaaggcggtaaggacacagcgcacaactctgcattatacctgcgagttaaaaagccaagggttcgctcactcaaccttgaatgcgcgtcagaatcacctgggggaggttttacaaaatacccgtgctccacccaagacaatgaaatcagactccctgcgagcggggccgaacatcagcatttttgaggacgctccctgtggctgtgcatcggtgatctttaatcccctgctacttgttagaggagctggatgacacttcgtgggctcattctcataaataagctgctgaatggagtcctctcctcccaagagttgtcggtgttgcatcttttttgttgtttatttttttttaagccaacggacgaagacatccaacggtgctgcatcttaatggagggacatccagctaaagggaatcttggagacctccgcgggtttctagcagctcgcggcatgttggtttcccagggcaagaggccgccactgaaggtcagctctgtctttccagctgggcactggaggctctaagtctgttttcagcaggatcggaggaaggagacggggtggcgccaaggaaggaggagaaaaggcggccgagaaaaggaggagggcaaggggaagaggaagggcgagggaggagcctgaggagactcgcccggctcaaccccgacgtccgcgccccggccgcctgttggccatggcgggcctgggcctgggctccgccgttcccgtgtggctggccgaggacgacctcggctgcatcatctgccaggggctgctggactggcccgccacgctgccctgcggccacagcttctgccgccactgcctggaggccctgtggggcgcccgcgacgcccgccgctgggcctgccccacttgccgccagggcgccgcgcagcagccgcacctgcggaagaacacgctactgcaggacctggccgacaagtaccgccgcgccgcacgcgagatacaggcgggctccgaccctgcccactgcccctgcccgggctccagttccctctccagcgcggccgcgaggccccggcgccgcccggaactgcagcgggtagggaggccgggcccgcagctcccctggctcccccgggctgcccgccgcctgaccctttcccatgtggctcgaacccctttcctcagccgttctacttttacgttccttttctcagtctaaaagtcgagttccgctcttcggaggcactttggaaagttcataaaagtatgaagaagtagaaaaaaacaaattccccatcttccgaaagcttgtcaacttagctgttacacagcttggcatatttcaacttcttcccaatcgatcttcggtctctttctctgaaacttgtaaaattgtggtaagatctatataacattaaaactggccattttaacctttttctttatttctttgagacggagtctcgctctgtcgcccaggctggatggagtgcaatggcgtgcgtgatctcggctcactgcaacctccgccccccagggtcgagtgattctcttgcttcaggctcgagagtagctgggattacaggcgtgcgccatcacgcccggctaattttggtatttttagtagagacggggtttcgacatgttagccaggctagtctcaaactcttgaccacagatgatccgtccgcctcggcctcccaaagtgctgggattacagtcatgagccacagcgcctggcctcattttaaccttttatttttttgagacggagttttgctttgtggcccaggctggagtgcagtggcgccatcttgtctcactgcaagctccgcctcccgggttcacgccattctcctgcctcagcctcccgagtaactgggactacaggcgcccgccaccacgcctggctaattttttgtatgtttttttctttttttaaaaaatagggacggggtttcaccgttgttagccaggatggtctcgatcttctgacctcgtgatctgcccgcctcggcttcctaaagtgctgggattacaggtgtgagccaccgcgccccgcctattttaaccatttttaagtgtacaattcagtgacaaattagttacatttcctgttgtgcaactatcacttctgtttccaaaactgtttcatcatcataaacagaaactttgtactcattaagcagtaactcctcatttctcctccctctagcccctgctcacatctaagctactttctgtatctgagtttgcctgttctagatatttcatataactggaatcgttcaatgtttgtccctttgtgcctggtttctttcacttagcatagtgttttcaaagttcattcatgttgtagcatgtgtcagaactttattccttttatggggctgaatgatattccattgggtggatgtgccacattttttttgtttgttttgttttgagatggagtcttgctctgttgccaggctggagtgtagtggcatgatcttggctcactgcaacctctgccccctgggttcaagtgattctcctgcctcagcctcccaagtagctgggactacaggcatgcaccaccacacccaggtaatttttgtatttttagtagagacgggttttcaccatgttggccaggatggtctcgatctcttgaccttgtgatctgcccacctcggcctccggaagtgttgggattacaggcgtgagccaccgcacccagcctcactgtgattttgatctggatttccttaatgactaatgatgttgcccatcttttcttgtgcttgttggtcatttatagatcttcattgcagaaatgtctattcaagtcctttgaccattttaaaattgggttgtttatctttttgttgttgagttttagagattccttctatattctggatatcaaattagatatgactcacagatatattataaaatatatattctcccattctaagcgttgtcactttcttgatggtatcctttgatgtgcaaaagttttaaatttaatttttatctgttgttttcttttgttgcttgtgcttctgttgtcatatttacaaatccattgccaaatctcagttcatgaagatttacccctatgttttcttctaagagtttttttttttttgaaacgaggtctcgctcctttcccagggatggagtgcagtgacacgatctcagctcactgcagcctccacctcccgggttcaagcaattctcctgcctcagcctccaaagtatttgggattacaggcgcctgccaccacacctggataatttttgtatttttagtagagacggggtttcactgtgggccaggctggtcttgaactgctgacctcaagtgatctgcctaccttggcctcccaaagtgttgggattacaggcatgagccactgtgccagcctcttctaagagttttatggttttagcttacgtttaggtaattggtcaattttaagttaatttttgtatatggtgtgaattaggggtccaacttcattcttttgtatgtggaaatccaattgtcttggtaccatttgttgaagagtctattctccattgattagacttggcatccttgtcaacaatcatttggctgggccaggcatgtggttcacacctgtaatcccagcactttgggaggccaaagtttcatctagagatgaaaccccatctctagaaaaatacaaaaaattagctgggcatggtggcatgtgcctgtagtcccaggtacttgggaggctgaggtaggagaaatcacctgagctgggagtttgaggttgcagtgagccgtgattgtaccactgcactccagcctgggtaatggagtgagactctgtctcaaaataaatgtatagttttatttctgtacattccattttattccattggtctatatgtctgtacttatgctggtaccacactattttgattactataactttgtagtaaatttataaatagagaagtgtgagttctttgactttgttttttgttttttttccccaagattgtttttgttattcagaacccctcgcaattccatctgaatttgaaaattggcttttccatttctacaaagtaggctgttggaattttgatagggattatgttgaatctgtagatcactttgggtagtattgacatcttaacaatattaagtcttctttccctaaaacacagaatgtctttttatttatttttatttgggtctataattccttcagtgatttttttttttgtagttttaagtgtataagtctttcacctctttgattaaatttattcctagctatgttattcctttttattattattattattattatttttttttgagacagagtcttgttctgtcacacaggctggagtgcagtggcacgatcttggctcactgcaacctccatctcccgggttcaagtgattctcctacctcagcctcccgagtagctggggttacaggtgcccatcaccacccaggctaatttttatatttttgtagagatggggtttcaccatgttagctaggctggtctcaaactcttgacctcaggtgatctgcctgcctcggcctcccaaagtgctgggattacaggcatgagccactgtgccaggcccattataatttattttaagaaatttttcaggcagattgtcatggctcacacttacaatcctagcactttgggaggcagaagcaggaggattgcttgagcccaggagttcaagaccagcctgggcagcatggtgagatccaattaaaaaaaaaagaaaaaagaagctatgagacccaatgaaaaaaaaaagaaaaaagaagctgggtgtgatgacacatggctgtggtcccagctacttgcgagactgaggtacgaagaacacttgaatccaggaggttgaggctgcagtgagctgttttcatgtcactgcactccagcctgggcaacagagcaacatcctgtttccccttaaaaaaatattgctacttatgcctgcacctgagcccaggcacacatctggattagaagatgccaggctcagaggatcttcctaaaggcaaggaccagatgcattcacacaggaaatgaactgtgttcactgagaagcaactggaagatctgaacatcttgttcaatgagaacccatacccaaacccctgccctcagaaataaatggcctcgaaaatagacatacacccaacaatactccaggtctggttcaagaaccacagagcaaaactcaagaaagccaaataaaagcatattcagcaaaaacaagaaactccacaaccgccaataccggagggtggagtcaccaccagtgtcggcctgagaaatgcagacacactacccagattgcccaacactgctcacctgattggcctggtgtacatgggtcatcgggtaccctctttccagctcatcctgtaccccaacatcaaggtccctgcagatgacttcgttggccacagaatagtccattttggctgctgccaagctcctaacgtatatggcttctaccccattttggaatcccaagtttgggctccaagcttcaattctgactcttctgcctgttcatctctacaaagttgagagatgataaatacaaaaagtcacatgtaaaaaaaaataaatactaaaaaaattttttttgtttgtttttttgagatggcgtctcgctctgttgccagactggagtgcggtggcgtgatctctgctcactgcaacctccgcctccctggttcaagtgattctcctgcctcagtcttcccagcagctgggattacaggcacacgccaccacacctggctaatttttgtatttttagtagagacggggtttcaccatgttggccaggatggtcttgaactcctgacctcgtgatccacccgcctcggcctcccaaagtgctgggattacaggcatgaaccaccacgcccagcctatttcaattttttttgaatgttttaagacttgtttttgtgacctgacatatgttaggtcttaggttttgtgacctatccttgagaatgatcatgtgctgaggaaaagatccatgtgtattctgtagcgtggatgtaaatgttccataaatatccattaggtccatttgatctacagtacagattaagtccaatatttccttgttacttttctgtctgaataatttgttcaatgccaaaagtgggttgttgaagtctccagctgttattgtattggagtctgtcttctctttagctctaataatacttgctttacatgtctgggtgctttagtgttggtgcatatatatttacagttgttatatcttcttactgaattgactccatcattataaactttgtcttttattatagattttgttttgaaatctatttgtctgatatatgtatagctaatcctgctcttttttggtttccattggcatgggatatatttttccatccctttattttcagtctatatgtgcctatagatgaagtgtgtttcttgtagggaatagatcattgggtcttgtttttttatccagtcaaccactctgtgtcttttgattgaagatttttgttcatttacattcaatgttattgataagtaattcttgccattttgttatttgttctttggttgttttgttttgtggtcttctcttccttctttccttcttttctgtcttcctttaaatgaagatgattttctctggtgctatgatttagtttcttgctttttattttttgtgtatccattatatgatttttgatttgaggttaccatgagcttgcaagtagtatcttataacctattgttttaagctgataacaacttgacactgcttgcatgaactacctaacaagcaaaaagaaaactaataaaaactctacacttcaaattcatcccctgctatttaattttttgttatttctgtgtatatcttatactatctatatgtttgaaagttgttgtagttattttttattggttttctgtgaccttactattactagtgaggtttttgttttgttttgttttgttttgagacagagttttactctgttgcccaggttggagtgcagtgacgtgatctcggctcactgcaacttccacctcttgggttcaagaaattctcctgtctcagcctcccgagtagctgggactacaggcatgcgccaccatgcccagctaatttttgtatttttagtagtgacagggtttcatcatgttgtccaggctggtcttgaactcctgacctcaagtgatctgcccacctcagcctcccaaagtgctgggattacaggccacctcctgggttcaagcgattctcctgccgcagcctctggagtagctgggattacaggcgcccaccaccacgcccggctaatttttgtatttttagcagagacggggtttcaccatgttggccaggctagtctcgaactcctgacctcaggtgatccacccgccgtggcctcccaaagtgctgggattacaagtatgagccactgcgcctggccttcttttctttttgattgaagtattccctttagcatttcttgtaggacaggtctggtgttgataaaatcccttagcttttgtttgtctgggagagtctatttctccttcatgtttcaaagctattttcacaaattatagttttctagggtaaaagttttttccttcagcactttacatatgtcatggcactttctcctggcctataaggtttccactgaaaagtctgctgccagatgtattggaactcccttgtatattatttatttcttttctcttgctgctttaggatcctttctttaaccttaacctttgggagttttattataaatgccttcacatagtcttctttgggttaaatctgcttggtgttttataaccttcttgtatgtagatattgatgtctttctgtagatttgggaagttccatgctattatttctttgaataaactttctaccactatttctttctctacctcctcttaaggccaataattcttagatttgcccctttgaggccattttctagatcttgtaggcatgcttcattctcttttttcttttgtctcttcttactgtgtattttcaaataggctgaattcaggctcactaattctttctaatacttgatcgattttgctattgagagactctgatgcattcttcagtatgtcagatgcattcttcgattccagaatttctgcttgatttttaattatttcttttttttatttattttttattttttattttttttttattgatcattcttgggtgtttctcgcagagggggatttggcagggtcataggacaatagtggagggaaggtcagcagataaacaagtgaacaaaggtctctggttttcctaggcagaggaccctgcggccttccgcagtgtttgtgtccctgggtacttaagattagggagtggtgatgactcttaacgagcatgctgccttcaagcatctgtttaacaaagcacatcttgcaccgcccttaatccatttaaccctgagtggacacagcacatgtttcagagagcacagggttggggataaggtcacagatctacaggatcccaaggcagaagaatttttcttagtacagaacaaaatgaaaagtctcccatgtctacttctatccacacagacccggcaaccatccgatttctcaattttttccccacccttcccgcctttctattccacaaaaccgccattgtcatcatggcccatccccaatgagctgctgggcacacctcccagacggggtcgtggccgggcagaggggctcctcacttcccagtaggggcggccgggcagaagcgcccctcacctcccggatggggcggctggccgggcggggggctgacccccccccccaccctcccggacggggcggctggccaggcagaggggctcctcacttcccagtaggggcggccgggcagaggcgcccctcacctcctggatagggcggctggccgggcggggggctgtcccccccacctccctcccggacggggcggctggccgggcagaggggtcctcacttcccagtaggggcggccgggcagaggcgcccctcacctcccggacggggcggccggccggaaggggggctgaccccccccacctccctcccggacggggcagctggccgaccccccccccccgcctccctcccggacggggcggctggcccggcagaggggctcctcacttcccagtaggggcggccgggcagaggcgcccctcacctcccggacggggcggctggccaggcggggggctgatcccccccacctccctcccggacggggcggctggccgggcggggggctgaccccccccacctccctcccggacggggcggctggccgggcagggggctgacccccctcccccctcccggacggggcggctggccgggcggggggctgacccccccacctccctcccggatggggcggctggccaggcgggggggctgacccccccacctccctcccgggcggggcggctggccgggcagaggggctcctcacttcccagtaggggcggccgggcagaggcgcccctcacctcccggacggggcggctggccaggcggggggctgatcctcccacctccctcccggacggggcggctggccgggcggggggctgaccccccacctccctcccggactgggcggctggccaggcggggggctgactcccccacctccctcctggacggggcgactggccgggcagaggggctcctcacttcccagtaggggcggctgggcagaggagcccctcacctcccggatggggcggctggccgggcggggggctgacccccccacctccctcccggacggggcggctggccgggcagaggggtcctcacttcccagtaggggcggccgggcagaggcgcccctcacctcccggacggggcggccggccgggcggggggctgagccccccacctccctcccggacggggcggctggccgggcagaggggctcctcacttcccagtaggggcggccgggcagaggggctcctcacttcccagtaggggcggccgggcagaggagcccctcacctcccggacggggcggctggccgggcggggggctgaccccccccacctccctcccggacggggtggctgccgggcggagacgctcctcacttcccagacggggtggttgccggacggaggggctcctcacttctcagacggggcggttgccaggcagagggtttcctcacttctcagacggagcggccgggcagagacgctcctcacctcccagacagggttgcggcccagcagaggcgctcctcacatcccagacagggcggtggggcagaggtgctccccacatctcagacgatgggcggccgggcagagacgctcctcacttcctagatgggatggtggcggggaagaggcgctcctcgcttcctagatgggatggcggccgggcagagacgctcctcactttccagactgggcagccaggcagaggggctcctcatatcccagacgatgggtggccaagcagagaagctcctcacttcccagacggggtggcggccgggcagaggctgcaatctcggctctttgggaggccaaggcaggcggctgggaggtggttgtagcgagccgagatcacgccactgcactccagcctgggcaccattgagcactgagtgaacgagactccatctgcaatcccggcacctcgggaggccgaggctggcggatcactcgcggttaggagctggagaccagcccggccaacacagcgaaaccccgtctccaccaaaaaaaaacgaaaaccagtcaggcgtggcggcgcgcgcctgcaatcgcaggcactcgacaggctgaggcaggagaatcaggcagggaggttgcagtgagccgagatggcagcagtaccgtccagctttggctcagcatcagagggagaccgtggagggagagggagagggagagggagagcgtggtgatgactcttaaccgatttttaattatttcaatcattttgttaaatttacctgatagaattctgaattccttctctgttatcttgaatgtctccgagttttcttaaatcagctattttgaattctctgtctgaaaggtcacatatttctgtttctcctgaattggctcttggtgacttatttagttagtttggtggggtcatgttttcctgaatggtcttgatgctcgtggatgtttgtcagtgcctgggcattgaagagttagttatttattgtagtcttcacagtctgggcttgtttgtacctgtccttcttgggaaggctttccaggaatttgaaaggacttgggcgttgtgatctaagccgtatctgcattagggggcaccccaagcccagtaaagctgtgactcttgcagactactagaggtaccaccttggtggtcttgtataagatccagaagaattatctggattaccaggcagagattcttgttctcttctcatacgttctccaaaacagtctgtctgtgtgctgagctgcctggagctggaggtggggtgacagaagcaccttgtggccatgaccactagaactgcacagggtcagacctaaagccaacacagcactgtgccttacccaagccccttgttaaccactatctggctaccacctatattgactcaaggacctagggctctataatcagcagatggcaaagccagccaggcttgtgtccttcccttcatggtggcacattcacccaggctcggggccggtccagagacccatctcagcactaggacttgcctaggagttgcagtccttgtggcctagactgcctttcaagtttatttagagccccagagcacttcagcccacagtggagaggcttgccagaactcaggttccaataactggggtgggtgatttgattcctctctggctaggactgatctaaatgctccctctgtgggtaggcgtcagctgaattcagcccagttttgctttgtgaagcgacaaggcaaagtctttctattctctttatcaccatgctctccctttcctgagtgcacagattctctgtgcatgtggcccctgacacatgggatatgggttgcattggcaattcaagactgtttctcctaccctcttcagtgcctgtttcagtaatataaagttaaaaccaggtactgtaagtacccctgatttttggttcttatgaaggtgcttttttgtgtagttgttaaatttggtgttcttgtgggagggatgatcaatggagccttctatttggctatcttgctctgccctctccacccttaagtcttctggctttcccccacttctctctggccctaaaccatttttaagtatacagtttggtgatatgaaatacattcacaatgttttgaaaccatcactaccatcatttccataactttaaaaaattttaaattaacatgactggttcttcagggtaccataactcttttcaactcgcaaaagtggaattctaggaggacattaaaattctccatttcctcttcccccagcctctggcaaccatcattctaatttctgtctctgattttgactactctaaatacctcatataagttgaatcatacagtatctgtctttttgtgactggcttatttcacttagcataatgtcttcaagggttatttatgttgtagcatgtgtcagagttcccttcctttttaaggctgagtagtattctattgtatgtatatgccactttttgcttattcattcatttgtctgcagatacttgggttgcttccatgttttagctagtgggaataatactgctatgggcatgagtttatgaatctctttgagatcctgttttcaattcttatatatccggaagtggaattgctaaatcatatggtaattctaattacatatatgtacatatatatatatatatatatatatatatatatattttttttttttttttttgagatggagtctggccctgtcgcccaggcttgaatgcagtggcatgatcttggctcactgcaacctccatctcctgggttcaagagattttcttgcttcagcctcccaagtagctgggattataggtgcctgcaaccacacctggtgaatttttgtatttttagtagagatggggtttcaccaggttggccaggatgatctcgaactcttgacctcaggtgatccacccgcctcggcctcccaaagtgctgggattacagccatgagctattgcgcctggcctatttttaatattttgagcagccaccattctgtcttccatagtggctatatcattcccaccaacagtgcagagggttccaatcttcccacaccatcaacatttgttattttggtttttttttttttgatagtagccaacctaatgagtgtgaggtggtatctcactgtatgttttgatttgcatttccctagtgattagtgatcttgagtgtctattcatgtgcttattggtgatttgtatatcttctttggagaaatagctattcaagttctttgcccatttcaaaattcagttgtttgtgggtttttgcttgtttgttttaccaaccaaacaagcggcagtgatatgtttttattgttgagttttagaaattctctgtatattctcagtattaatgccttatcagatgtatgacttgcaaatattttcttccatttttgtggattgcctttttactctattgttcgtgtcttttgatgcacaaatgtttaaacatttcatgtagtccaatttgtctccttttttcttttgttgcctgtgcttttagtgacatatacaataaatcattgccaaatccaatgtcataaattttgccctatgttttcttctaacagctgtattattttaggtcttacatttaggtctttgatccattttgagttagtttttgtatatgatgttaggtaagggtccagccatattcttttgcatatagatatccagttttcacagtacaatttgttgaaaaaactgtcctttctccattgaatggtcttggcaccttcgtcaaaaatcatttaactatatatgtgagagtttatttctgggtactctattgtattccatcggtctgtatgtctgtttttatgccattaccacagtatttatgattccctctgtctagtggtggttcctgggtccagttttatagaacccaggacctgaactttgctattttgaaggtggcagtagagaagagcatcacagaagttgctcaggagctgacagagctggtggaacatcttgtagacattgtcagaagcctgcagaatcagaggcccctatcagaatctggaccagacaacgaactgagcatcctgggcaaggtaggctccactgggagaggaaaggatgtggaagggaatagggctagggattgctttcaactggaacaacatgaacatatttgaacctgaaggatacaataagtctcaatcttttattgttctctttactaccagacatggatgattggacatttggaatgcttgaggtaaggttgggaagcttcagatgggctaggatcactccacctaacaagctgtctctaagatcaccagtgacctctgtgtataacgttctggtgcctgtctctataagcgttctggtgcctgtcttcattgacctttcagcagcctttgacactgtggaccacaccttcattcttagcttttgggacaggaatcttttggctttcccccacctctctctggctgatccttctcagtctgtttacaggctctctctcctctgcttaggaattaaatgctggagttcctcaaggctgagttgtaggtccctttgtttcccctgcaggtagtcttccctgcatccatggctttaatgaccacctctatgcacaaataatagctccaggctggagccttctctgagcactaggctgctatgtcttccttctcatcttttcttcttgggtatctcaaagcatcacacttaatgcgtcctaaactgctcctcttctgggatttctcatctcaatgcttgccccattatctttccaagtacagaagccagagacctggaaatcatgttaccttcttctcccttaccctaatatgcagcatattgtagctttaagacctgcctaattacctctcaaatctatttacttattcttgagctcctttgagacttgctctaatccaagcctctgataatttcatgtctggattgctgtcatagtcttccaaatgctccactctccctcttctagtctgttttcctcatggtcatcacagtgactaccacaaacatcaatctgaaaatgtaactcatctgcttaaaacattcaaattacatcagtttgctcaggagtaagacccaaatcctcacaggaccagcaaagccctgtaggatcccatctctgtctgcctctcaaatctcatctctgctcatgctgcctggctctgtgcgctctagctacactggccgcacagtcgctctagtgtgtctcacgtcttcccactacagggcacccttcatggaatgctctcctttccctccatcacttaggtaatacttgctcatccttcagatcctagctagaacgtcatttcttcagaaagaagccttcaatgatttccttgaacaaatcaaatctccccattagaggctctgaggactccatgtacctttcatttgtagtggttatcaccattgcacctttgtaatgtcttgtgccatactctatattaatgtctgcccccctcccttttccttcactggactctcaacttcaggaggatagggacttttgatgctttttttttttttgagacagagtcttgctggagtgcagtggcgtgatctcagctcattgcaacctccgcctcctaggttcaagtgattctcctgcctcagcctgccgagtagctgggactacaggtgtccgccaccactcctggctaatttttgtatttttagtagagacggggtttcaccatactggccagtctggcctcaaactcctgaccttgtgatccacctgcctcggcctcccaaagtgctgggattacaggcgtgcgccacattgcctggctgatgcttttgttcttttgtccaccattgtgtccccaggcgctagcacagtacccaagtacccacttacagtaggggttcaacaaatacccactgaatgtatggataaatccatctttagggatgcgatgtgttgggatagaaacgctgagagtctgactttcagaattgacattgtcactcactagtattatgaccttgggcaagtcatttcatctatctgcgtctcaggttcctatctgtaatatagaaataatgatacagggcctgccacatcattggtttattgtgaggattaaaagaggtataagaaagtgcttgagcaatgttaaaatgtgggatgttataattaactgtggcaatttagttaaccttcatgaatttcatcttcttttgtaaaacggagattttttacaggttgataaacctactttgtgaggttgttatgcaaatgagagaaaggcaatatctagcatgtagaaaacactcaataagtgtaatactaccgtattttgattggtggaaagaatggggagtggattatgcaaaggtgggaaggaaaggggttgaagttggtgagcagataaagggctgtattggggaagaacaggacctgaggctaaagaaaatcagggagcatgtgttgaaggccctagaaagcaggacctggatgcaggcaatttgagagggagctcttgcgaagtgaaatgatataatgatagaggtgggaaaaggttcctttttttttttttgtgaaatggagtcttgctctgtcgcccaggttgtagtgcagtggcatgatcttctcagctcagtacaacctctacctcccgggttcaagtgattgtcctgcctcagcctcccatgtagttgggattacaggcacttgccatcatgcctggctaatttttgtatttttagtacagacagggtttcaccatgttggccaggctggtctcggattcctgacttcaggtgttctaccctcctcagccttccaaagtgctgggattacaggtgtgagccaccacacctagccgaaaaggttattctgacctccatggtttatctcagtaactatctgtagtatttattttataaagcccctataagatgcgcctagaaatgttaaacttttttggtattacctaagaaatccatgtttattgtgcaaaatattagaaagcacatagcattaaataaagcaaattaaagtgctccataactccatcacccagaaataaccactctttgatatttttgctgtactatgtacagcaaattattccagatttttttcaaggcatattttttgagggcctaattttgtttttaaaaacttgctgggaattaaatagaaaattatagatgaatagaaaaacttgaatataatagttgatagactgcataggggacttccatttattcagttttaaatggtttatcaataggctttttcttctggggtggatctttccatggcttctccaaagctggtgacttccgacacagctgcagggaaaatcagagatattctccatgacctagaagaaattcaggaaaaattacaagaaagcgtcacctggaaagaggctcctgaagcacaaatgcagggtgagctgatcttatttattggaggaggattaaatatggaagttggggggagtagcagagtgctctatggctttgttctctggggataggatcccagagtccagctgtattaccactgtggtgtcgtgaatcaggtaggggtgggctgaagtgattttgtggctgaatatgtttttggcaatgactgaaggtgtgatgtatcacaagtccttaatagatagaaactcatttttgaagatccatgcacacaggtccttactgatcaagtgtgttatcttactgcagagattctgaaataggccacttttaatttttttttttttttttttttttttttttgtgatggagtctcactctgtcgcccaggctggagtgcagtggcaccatctgggctcactgcaagctctgcctcctgggttcatgccattctcctgcctcagcctccccagtagctgggactacaggtgcccgccaccatgctggctaattttttgtgtttttgatagagacggggtttcaccatgttaacgaggatggtctcaatctcctgaccttgtgatctgcccgccttggcctcccaaagtgttgggattacaggcgtgagccaccgtgcctggccttaaatttttaactagtaaatgtcttcttcttttttttttttttaataattttgttttgtttttgttttattttgagacagagtctcactccgtcacccaggctggagtgcagtggtgcgatcttggccagaattacaggcgtgcgccaccacgcctggctaatttttgcgttggttttttttttcttttctttctttcttttttttttttttttttttaagtagagacagagtttcaccatgttggacagactggtctcaaactcctgactgcaaggctcacctcagcctcccaaagtgttgggattacaggcgtgagccactgcacctggctgtaaatgtctttcttaacaaagcatataggccaagtgcagtggctcacgcctgtaatcccagtgctttgggaggctgaggtgagaggatctcttgaggccaggagttcaagaccagcctggactacagagagagatcctgtctctacaaaaaataaaaagtaaccagatgtggtggtgcacacctgtagtcccagctactctgtaggctgaggctagaggatcacttgagccacgggttcaaggctgagtgatcatgccactgcattgcatcctgggcaacagagggagatcttgtctacaaacaaaaccagcatgccactttgtaactagttcttgatacagtctattaaaatataatctctggggagtgtgttaatgttaatattaaacagtaccatatagaaaagaacctttctgtcctgatcctgtagtttctctgttgttcttccagagttattgaaaaataactaacaccttcctgtcagacattagacgttagctctgtctggtctcccagggttcttcctcctgctctggccactgctatcttcatatgctttagaggcatttcttctgtagcttttcctcttctgatagcttttatatcctttatattttcatatttaaacaatcttatgctacttaaaaaatcatttctggccagtgcagtggcttatgcctgtaatcccagcactttgggaggccgaggcgtgtggatcacctgaggtcaagagttcaagaccagcctggtcaacctggcgaaaccctgtctctattaaaaacacaaaaattaactgggcatggtggtgggtgcctataatcccagctactcaggaggcagaggcacaagaatcacttgaacctgggaagcagaggttgcaccattgcactccagcctgggcaacaagagtgaaactctgtctcaaaaaaaaaaaaaaaaaaaaagaatcatttcttatgtaagtggagaagcatgattccttggaaaaagtttctttaggaaaacaattagagagcagtttattgttccaaaaattatctgagaaagaagcacctttgtattctgtgtgcttctaaacttaggttgggttccttagtgattttatttatacaaatttaagatcaatttttaaattttggggggttaaatttaaaatttcatattcaaaaatcaaaacagggctgggcgcggtggctcatgcctgtaatcccagcactttgtgaggccaaggagggtggatcacctgaggtcaggagttcgagagcagcctggccaacatggtgaaaccccgtctctactaaaaatacaaaaaattagccgggcgtggtggcacactccagtagtgccagctactccagaggcttaggcaggaaaattgcttgaacccgggaggcagaggttgcagtgagccactgcactccagtgtgggtgatgagcgaaacaccatctcaaaacaaacaaacaaacaaacaaaaacagtataaaaagggcatactgcccagtctctcttccatccttgccaattgccccattctctcttctcagtgcaccacttttattaccgtttttttgagtgtctgttcagaatttatttatgcaaatgtcagcgaatatgaatttatatttttatttctcccaatctttttttaatacacaaaagatagcacattatatacattgtcctgcattttgcttttgtcttttactttatacatctttattttatagtacagtagttaggacatttttccttgcttttgttagtacctagggcattttctcttacagttgctcagtattccaatatctgggtatgccaacatttatttactccatcctctgcagatgaatacgtgattgtttccaattgtttacaatgacaaataatgctaaaatcaataactgtgtatgtacattgtttcatatgggtgtagatatatttgtagctcaaattgccagtgaaggttgctgggtcatagggtaaattcatttgtcattttgatatacattgccaaatcaccctccagttgggttataccagtcttcactcccacagaagaagtgtgtgtccccaacctgccaactgagtatgttgtcaaacatttgtctttttttttaaaccaatctcatgggtcaaaatattgatgtgaaattagccagtcttggtggtgggtgcccgtaatcccagttacgtgggaggttgaggcaggtgaattgcttgaacccgggaggcagaggttgtagtgagccaagaccgtgccattgtcctccagcctgggcaacaagaatgaaactctgactcaagaaaatacattgacgtgagagtatactgcgcgttttttttctctttctctttctttttttttttttttgagactgagtctcgctcttgttgtccaggttggagtgcagtggcccgatctcggcacactgcaatctccgtctcccaggttcaagtgattctcctgcctcagcctcctgagtagttgggattacaggcacctgccaccaggcctcactaatttttgtacttttagagatggggtttcaccatgttggtcaggctggtctcagactcctgacctcaggtgatctgcttgcctcggtctcccaaagtgctgggattacaggggtgagccaccgtgcccggcctatactacacttttaatttgtgtttctccatgaattgtctttcatatcttgtgttattggtcttttaaaaattgacatttaggagctctttgtaaattaaagagattaaacttttgtctgttatatgaattgcaaattttgttccttaatatgtcatttgtctttttatttatcttttatgggttttataatgccatatagacatttttaaatttatgtaatttttttttttttttgagaagcagtttcgttcttgttgcccaggctggagtacaaaggtgtgatctggctcactgtaatatctgtctcctgggttcaagtgattctcctgcctcagcctcccaagtagctgggattacaagcctgtgccaccacacctggctaatttttgtatttttagcagagacagggtttccccatgttggtcaggctggtctcaaactcttgacctcaggtgatccacctgccttggcttcccaatctgctgggattacacaggagtaagccactgcgctcggcctttacataattttttatagagatgaaatctcactgttttgcccaggctggtctcaaactcttaggctcaagcaatccttctgtctctgcctgccaaattgctgggattacaggtgtgaaccaccatgtctggcctcaatttttttttttttttttagagacaatagacagagtcttgttctgttgcctagactggttgactagagtgctgtggcaattcctggtctctaaatgtttcttttttattttttgagacaaggtcttactttgtttcccagggtggagtgcagtggtgcgatcatggctcaccccagccttgacctcccaggctcaagtgatcctccctccttagcctcctgagtagctgggactgcaggtgcgtgtcaccgcacctggctaattcttgtatttttgggtagagacagagttttgctatgtttcctaggctggcctggaactcctgggctccagcaattagttcaccttagctgcttgagtaggtgggactgcaaggtggcgctaccacactcagttaattttttgtttattttttttgtggagaagaggtcttgcttctattttcatgtagtaaattttgttcattttttcttttatgcattgtagattttaagttttagttagaaaactcaaccccctgaagtttagaaaggaattttctcaggtatatgtgtgtgtttgtacttacacagtttacatttaaatctttggtttcatgttttacatttaaatctttgactcacttcaagtatatctcagcatgtatcctagtgcattttgttttatttgtttattattattattattattattattattattaattttgagacagagtctcactctgttgcccaggctggagtgcagtggcgcgatctcggctcaccacaacctccgcctcccgggttcaagcaattctcctgcctcagcctcctgagtagctgggattataggctcccgacaccacatctggatactttttgtatttttagtagagatggggtttcgccatgttggccgggctggtcttgaactcctgacctcaggtgatctgcctgcctttgcctgccttggcatcccaaagtgctgggattacaggcatgagccacagcacttggccttatttattttttaaatagagacagggatgtcactttattgcccaggctggtgttgatctcctagcttccagcaatccttgtgctttggctcccaaagtgctgggattacaggcatgagccaccataccgagcccctagtgaattttaagtaagatttgtgtagtgccactttagagacatatctcatagcattttcatgtttaatgatattgctctgcttaaaatgttgctcttaactggagaaccatgattctttggaaaaaatttccatggttaagtgtagattatttctctcatcaatagagataaaaaaagtattagggagtgttaatttaaaaaaaaaaagtaaataacttcagtaggttttgcaaatgctttttaaaaaatttttttcctttctttttcttttgtttataatctgcattctgctgaattaattaattaattaatttttttattttgacacaggttctctgttgcccaggctggagtgcagtggcacaatcactgcagcctcgatctctcaggctcaggtgatcttccttcctaagactcccaagtagctgggactacaggcatgtgccaccacactcagctaattttttgtactttttgtagagatgaggttttgccatgttgcccaggctggtctcccactcttgggctcaagcgatcctcctgcctcaacctcccaaagttgttggattacaggcgtgagccacggtgcccagccaaacattttttaaaaacctattaacaataagtaataatcgtatcagcaaaataggagaacagtgatattcatctgaattttgtgtttttctaaattgtagtgaaaatacatacaacataaaatttactatcttaactatttttaagtaggcagctcaggcaggtgcagtggctcatgcctgtaatcccagcactttgggaggttgaggtgggcagatcagttgagtccaggagttcaagagcagcctgggtaacatagtgagacccacttctctaccaaaaatacaaaaactagcctgctatggtggcacacacctgtagtcccagtcccagctacttgggaggctgaggtgggaggatcacttgagcctgggaagcagaagttgcagtgagccgaaatcaggccactgcactccagcctcggcaacaacaacaaaaaaagtagcagctcagagctcagtactgttaagtatgtttacattatcatataaccaatctccagatcattttcttttttgtaactttattttattttatttttttttttgagacagagtttcactcttgttgcccaggctggagtgcaatggcatgatctcggctcactgcgacctctggctcctgggttcaagcgattctcctgcctcagcctcccaagtagctggcattacaagcatccaccaccacacctggctaattttttttatatttttagtagagacgagggtttcaccatgttggccaggctggtctcaaactcctggcctcaggtgatccacccgtctcggcctcccaaagtgctgggattacaggtgtgagccaccacgcctggactgtaactttaattttaattttttaggatcaggtcttactttgttgcccaggctagagtactgtggcacaactatggctcactgtaacctcaatcctcctgcttcagcctccccagtagccaggactataggcccacaccaccatgctcagctatttaaagaattgttttggccgggacagtggcttacgcctgtaatcatagcactttgggaggccgaggcgggtggatcactaggtcaggagatcgagatcatcctggctaacacggtgaaaccccgtctctactaaaaatacaaaaaaattagctgggtgtggtggtgggcgcctgtagtcccagctactcaggaggctgaggcaggagaatggcgtgaacccgggaggtggagcttgcagtgagctgagattgcgccatcgcactccagcctgggcgacagagcgagactcagtctcaaaaaaaaaaaaagaattgttttgtagagacagggtctcattatgttgcccaggctggtctggaactcctcctggcctcaagtgagcctgctgcctcagcctcctaactagctgggactataagcatgggccaccatgcctggtttcatgttgcagaattgaaactctatacccattaagcaacaattccacattccttcaaccccctcctacctggcaaccactattccactttctgttctatgaatttgactattctagatacctcatgtgagtggaatcatacagtattagtgtgtgagaggtttatttcacttagcataatgtcctccaagctcacctatgttgtagcatatatcagaatttgttactttttttttttttgagacggagtcttgctctgtcacccaggctggagtgcagtggtgcgatcttggctcaccgcaacctctgcctcccgggttcaagcaattctcccacctctgcctccctagtagtagctgggattacaggcatgtgctaccacccctgactagttttgtgtgtgtgtgtgtgtgtgtgtattttttagtagagatggggtttcgccatgttggccaggcaggtctcgaactcctgacctcaggtgatccgcccgcctcagcctcccaaagtattgggattacaggcgtgagccaccacgcccaggcagaattcattacttttttttttttttttttttgagatggagtctcactctgtttcccaggctggagtcagtggtgcgatctcggctgactgcaaactccgcctcccaggttcaagtgattctcctgcctcagcttcccaagtagctgggattacagccatgtgtcaccacacgcagctaatttttgtatttttagtagagatggggtttcaccatattggccaggctggtcttgaactcctgaccttgtgatctgcctgtcttggcctcccaaagtgctgggattacaggtgtgaaccactgcgcccaggcagtattcgttactttttaaggctaaataatattccattgtatgtatatatcacatttctttatccatttttctgtctctggacacagggattgcttcagttccgagttgaattttgagactggcctctttacaggcagctctcttgctctcatgacctaagttaccacaggcacaccctagacaaggtctttcatctcttctcaggtggagtcttagattcactgcagctgctgtcacttcaagatacaagtaggacaagattttgccttcaaagtctgcactctaggacttcccttacttatcatctgcctgacgtggtcattgcactctagcacacatgactgctttaagttaataattaaactttagcacatcgagagggaattaggaggtgtcagcaatggtgatgaatctcaccccaactcatgttacccagtttatgtaacaacagtttaaaacattgacttgggggtcctggatattctaggtgttagggtgctgcaatcccctggaactgtattagttgattttatttcatgagtgtgcataaaacaccttctatctatgggactggcatggggcttggtgcttagaacatatagatgaacaagatctttgctagcaaggagctgagagcttagtgaagaaagagtgaaaagtccacagtgagaacatggaggtgcacatacctgggctgcaggcacactgcctctgcctgatccagtcctgacactgaaaaatgtgtagatgataagaagacaagccagccatgtgccttgaccatgatgtttggagaccttcagtttgcctttttctgatgggactttcctctgttaatttttttgttacttaggagaactcctggaagccccgtcttcctcctcatgcccattgcctgaccagagccaccctgcactcaggagagcttctcggtttgctcagtgtaagtatgtggtccactttaaacatgggtttggcttgccgcagagcgggcttcgagaatatcctacatccatctccctactgctagggccactccttggcttactgcacatggatttgttccaggtccctccacggggggagctgattgcaaaggcaaagcaggttgagactctagacccaagagcactcagagtcccgccaacctttgagcatctctgctgtggccaccaactacagccaactgcctgttcccaaacctgctgaggtatttctgcatctgtgctgtggccaccaactatagccaactgcctcttcctaaacctgctgaggtatttctgccatctcagtctgggatagtccttaagagcatggatcccagagccagactgcttgggtttgactcccagcagctccactaactagctgtgtgatcttgggcaagtcacttaagcttcctagagcctgggtttcctcatctgtaaaatggagataatatagtacttctcttgcgggattgccatgagggttaagtgagtgagtatgagtaaaacacctagagtagtcatgctgtataagtgttagcaatttattcactcaataggaaaccaaatgaaatatacaaagtgagtaagacatggtcctcaatcaggaagtttcagtttaactgggaaggtataaacagctgtggtcataaatcaccataagacgggcgtgagccaccgcaccttgcctacgcccagctaattttggtatgtttaatagagacaggagttggccatgatggccaggctggtcttgacctcctggcctcaagtgttccacctgcctcagcctcccaaagtgctgggattacaggggtaagccagtgcacctggctgaaggagctggcctgatttttaaaattgacatataataattgtatagtctgggtgcagtggctcatgcctgtaattgcagcactttgggaggctgagatggcaggattgctggagctcaggagttcgacaccagcctaggaagcatggcaaaatcctgcttcttttctaaataaattttaaaaataaataaatataataagtgtacatatttatgggatacatagtgatgtttcaatacatatggtgcatagtgatccgatcaaggtagttagcatatctatcatctgaaacatttatcatttcttcctgttgggtgatgtagcaattttaatgctagtgtgagtgaaacatcacaccaaaagatacaaagttgctatttgaagacttcttagcatggaccatcaaaagatgaccggccatgttcttattgttctttttttttttccaaaggggccatccatccaacctttaacttgaagagcctttcctgcagcctggaggtgtccaaggattcccgtacagtgactgtgtctcaccgcccacaaccctatcgctggagctgtgagaggttttctaccagccaggtcttatgttcccaggccctgtcttctggaaagcattactgggaagtggacactaggaattgcagccactgggcagttggggtggcttcctgggagatgagccgcgaccaggtcctgggaaggactatggactcttgttgtgtggaatggaaggggactagccagctctctgcatggcacatggtcaaggaaactgtccttggctcagacagacctggggtggtgggcatctggctgaaccttgaggagggaaagcttgccttctattcagtggacaatcaggagaagcttctgtatgagtgtaccatctctgcctcctctcctttgtaccctgccttctggctgtatggcttacatcctggaaattacctgataataaagcaagtaaaggtgtaaggtttcctaagggattacaacacagtggtttcctggtctctctccctgtcatcaatcagggtagtaacttgacttaagaataccactttttagaaaaattacgatagagatgggatctcactaggttgcccaggctggtgtcgaattcctggtctcaagcagtcctcccacctcagcctcccaaggtgctgggattacaggtgtgagccaccacacctggccaagaataccacttttgaagttaatccttttgtgtgatacaggatgaacttgggatgtttgaaccctggacattccaaataaagaataggcccctgcctggctcctgggagataacctctaagccattagaatatcttgcctgataagagtgtttttgtttacctgtgggccttgggccatgcagtatcagcttgaccttgcaaggtcaagctgaggagactaagttagccatgtgggcagtgaagcatgccaatgtgatcaatccctagtaaaagccctggacacctaggcatgggtgagctactctggttggtaatactctgtgcacacatcattgtagccacacatcattgctgggagaattaagcattatcctgaagactctgccaggagaggataattggaagttctcttggaccttaccttatgtgcctttcttcattgctgattttaatctgtatcctttcactgtaataaactgtaactatgagtgcaacactttgctgagttctgtgagtccttctagtgaatcactgaacctgagggcagtctcagaggatctctaaacataatttgctacttatcagttgctatgtaagaatattgccacaaatttaatggtttaaaataacacatagatattatttcacagtttctgtgagtcaggagtcagagcatagcttagctgagtctcctacatcagagttttacaagctgcaatcaacatgtcagctggggacacagggtcatctgaggctccaatggggaaggatctgcctccaaattacatggtcattggcagccttcagttcttgagttgccggactgagggcctcagtttctttctggttgttggctggagaccgccctcagttccttaccccataggcctttgcaacacagctgcttgtttcctcaaagacaataagggagagggtctcctagccagatgacgcaaaatcttttttttttttttgagacggagtctcactcttgatgcccaggctggagtgcagtggtgtgatctgggctcactgcatccgccgccttccagtttcaagcaattctcctgcctcagcctcccgagtagctgggattacagatgtctgccactacgcccggctaattttttttttgtatttttagtagagatggggtttcaccatgttggccaagctggtctcgaactcctgacttcgtgattctcccgcctcagcctcccaaagtgctgggattacaggcatgagccactgcacccggctgacacaaaatcttacatagcataaccacataaacacgtaatcacgtacatcccattgcctttgccttctattgattagaagcaagtcacgttaccacccacactgaaggggaggggattacagaaggacatgaatgccaggaagtggggctaatgggggccactctacagtatgtctgacacaggtgttatttcatacttgatttcccctatttttaacaaccattttattatataagaaaacagatacagaaaactacacaaaacaagtggtgcttaatgagttattataaggtaaatacccttgtaactatcattcaggtcaagaaatagcacctgctgcccaccccagaagcgccttcctgtgccccattctaatcacaaaaccctccctgtgcctgaaaggagtcttgacattcacgccaaacacttccttgcatttctttagagttttatcactcaaatatgcatccatagccacagtagtttcatcttgcccattaaaaaaaatggtatgtcctttaacagctttgttgggaatattatttatttatttatttatttattttattttggagccaggttctcacattgtcaccaaagctgaagtgaagtggcatgaatcttggctcactgcaacctctgcctcccgggttcaagtgatcctcagcctcctgagtagctgggattacaggtgtgagccaccacacccagctaatttttgcatttttagtagagatggggttttgccatgttgcccaggctggtctcaaactcctgagctcaggcagtctgcctacctcaggctcccaaagtgctgggattacaggcgtgagccactgtgcctgactgacatataatttacattctatgaaattcacttaaggtgtacaaatatatgttttttactatatttacagagttgtaaaaccatcaccataatctaattttaggatattgtcatcacccccagaaagaaccctcatgcccattatttaatgtctgttagtctcctaatatacatgtctctctctctctctttttttttttttttgtcttacagttcatccatagaaggactctggtcttgactagcacctattctgaagatggggacgttcagctcctgaactaggttgaagagaaaaccctgtcatgcaaaccagccaggcagcgtttgacagtatatttaaactcttcttgcctttctttcctctctaaaatggacatcattattatttgcccttccttaccttcctcacaggtttgctgaaaccattaaataaagtaggaggtgaggaaatcggaagaatacaaggatgatgattatcacagcagcaatgatggaattacatcttaatatcacccaccttggcctctaacatcctgagactcacacctaatttctatacatgattaatcgctccttcaaaacaggggtaagcagaattcttccacgtggtctactaatatgctttctgagcctcaccactgccctgcgtgatgggtattattaccttcctgttgatgcataaggaagcagaggccgggacaggtgtggtggtttgtccggggttgatcagccagtcatggcagagctggaaccaggcccagttttctcacttttgtttgttgttgttttttttttttttttaagacagagtctcgctctgttactcaggctggagtgcagtggtgtgatcttggctcactgcaacttctgcctccagagttcaagtgattctcgtgcctcagcctcccaagtagctgggattgtaggtgtgcacccccatgctcggctaatttttgtatttttagtagagacagggtttcaccatgttgtccaggctggtcttgaactcctgacctcaagtgatccacccacctcggcctcccaaagtgctgggattacaggtgtgagccaccatgcctggctggttttttcactctgaagcctctcccctcgttactctccgataaggtcctatgctaaggccaggacctggccttccactttgatgggacacagctagccctaaagtcatgaggtaccctttctttttgattttggtggttgtccttaagtggccttgagttgtctaagcagtgacaaggcttccttgtttgtgccaagtgaccactaagaagctatgggtggccgggtgtggtggctcacgcctgtaatctcagcacttatggagtctgaggtggacagatcacctgaggtcaggagttcgagatcagcctagttaacatggtgaaacctcgtctctactaaaaatataaaaattagctgggcgtagtagcacacacctgtaatcccagctatttggaggctgaggcaggagaaccacttgagcctgggaggcggaggttgcagtgagccatgatcttgccactgtactccagcctgggtgatacatcaagactctgtctcaaaaataaataaataaggctaggcgtggtggctcatgtctgtaatcccggcactttgggaggccgaggcgggcggatcacaaggtaaggagttcgagaccatccaggccaatatggtgaaaccctgtctctactaaaaataataaaattagctgggcatggtggcgggcacctgtagtcccagctacttgggaggctggggcaggagaatcgcttgaacctgggaagtggaggttgcagtgagccgagatcacgcaactgcactccatcctgggtgacagagcgagattctgtctcaaaaataaataaataaataaataaataaataaataaataagtaaaaagaagctataggccctcactttctgcatcatggagcttttatcttctaacccagagttaatttgatatttgccttttgagccaagattcagagtttggagtgaagggtttcagcctcttgaggttttttggttaaatattgtcctctcagacagtatgtattgcaatgaggcctctgtgagtgttggttttatctgcctgccacatgatgtccccagactggagccagagcactagaatcagaaacataggaaaggaaagaaggctatcacttttgattgctttgcttttggcttgcactttgtgtcagcatatctcttccaggacactgtagaatatagtgtccttccttcaaacaaaacacaaaatctccaaaggagaataactaaagctgaaatgccagtggatgaaggacctctcactggggtctgcactgtgggggcgaggaaatcatctgcctatggaccaagccagaaagactttccttggggctatcttagtccattcgggctactataacagactcccatagactgggtggcttacaaaaaacagaaatttatttctcagctgggtatggcgactcactcctgcaatcccagcactttgggaggccaaagcaggaggatcacttgagcccaggagtttgagaccagcctggacaactaaatgagatcccgtctccacaaaaacattttatattagctgagtgtgatggcatgtgcctgcagtcccagatactctggaggctaaggctggaggactgcatgggcccaggaggtcaaggctgcagtgagctgtgatcatgccactgcaccccagcctgggtgacagagcaaggccatctaaaagaaagagagagagagagagagagaggagggaggaagagagagagcaagagagagagagagagagacaggggggaaaagagaaaagaaaagaaaagaaaaagaaaggaaaaaaatgaaaaaagaaaagaaagcaaatttatttctcatagttctggaggctgggaagtccaaaatcaaggtgctggcagatttggtgtctagtgagggagctctcaggagttcccccgccgtttttttttttttttttttttttttgagacagagtcttgctctatcacccaggctggggtgaagtggtgtgacctgggctcactgcaacctctgcctcccaggttcaagcaattcttcctgcctcagcctcttgagtagctgggattataggtgcctgccaccatacccagctaatttttgtatttattagtacagacggggtttcaccatgttggctaggctaggctggtcttgaactcctgacctctggtgatccacccaactcagcctcccaaagtgctaggattacagtcccttttataaggtcactaatctcattcatgaaggctctatcttcatgacccaatcacctcccaggactgtcatattgggagttaggatttcagtacatgaattttgggagaacacaaacattcagtctatagcggagacacactgcttcataggagagcacgaggaactcctttggcagctttctgcgctatctggggacattgttctcaaaaatttgttttctatcaggccttgtctctcaagtgtttttttttcctgggggttgaggagaatggagtgttctcatcagtgccatgggctgcttctgtccttctctcttctcttccacctcacacactctggtgaagcagctgctggatagttctgttgaacccactattgggtccggggctttgggttcctggaagaccacctgctaagcaggaagccaccatcttgttaggcttgaggaaacctctaaaatagttatatctatctgtcccttgcttctctctcaaatactattttgttttgttttgtttttgagacagtctcgctctatcacccaggctggagtgcagtggcacaatctcggctcactgcaacctccgtctcccaggttcaagtgattctcctgcctcagcctcctgagtagctgggattatgggcatgtgccatcatgcctggctaattttttacatttttagtagagaccaggtttcccagtgttggccaggctggtcttgaactcctgacctcaagtgatccacccgccttggcctcccagagtgctgggattacaggggtgagccactgtgctggccttatttttattttattttatgttattattattattattttgagatggagttttgctttgtccctcaggctggagtgcaatggcgcaatctcagctcactgcaacctccgcctcccgggttcacgccattctcctgcctcagcttcccgagtagctgggactataggcaccaccaccatgcccggctaatttttttttttttttttttagtagagacagagtttcaccatgttagccaggatggtcactatctcctgtccccgtgatccgcctgcctcggcctcccatagtgctgagatttacaggcgtgacccactgtgcctggccgcttgcttcctattttctatgaactcatggcactactgttgaacctttcgaggttcctctcatggccctggaacctgctttccactgtaaaacattctttcattctttcttccgaaattgcatccttatcttagctaagcaaaactattttctgaataaactatctccctgatggtttttcagatagagactgctgtaggagaagaaagatttccatgttctcctagctcctcacatactcaatgactactttcctgttactccaaacccttcctcctcacaagctaatattctacattctatttgtcagtttctgtcattaatagctctctaggctgttctcccacattcaatgactatctacagccaacctatccaaaacctgagatcacaccaaggtatggtgtggccacgttccattcaacagagttctttgctttctactccaagacttgcacttgtccatacccctaactgtgctgctccatactagaagtcttaacattgtaatgctccactcttggccgtggcttcctcttttagttccttttctcttcgtgtttctacttagggactcatcaagacatctacactctctccctttctttctttctttctttctttctttctttctttctttctttctttctttctttctttcctttctttctctttctttcctctctttctttctttccctttcttctctttctttctctttcttttccttcttttctctctctctctctccctctctctctctctctcctctttctttctttcttatgcatatatctcacctaagacatccagacttgaacttttcacatcttctcccaatttatcagttgctctctttgcttcctgcttccatttcctagctagcccaagtcccacagtgtagctcatggacttctttcttcagcactttgaactttcttacttcctcattcctctgggacacaaaacttgtctattggtcatcgaaattctttgacccaacatatttcatagtaatggtaacatcaatcccagcctacaacttttttatttatttatttattttgagacggagtctcgctgtgttgcccaggctggagtgcagtggcgcaatctcggctcactgcaagctccgcctcccgggctcacgccattctcctgcctcagcctccggagtagctgggactacaggcgcccaccaccacgcctggagaatttttttttttttttttttttttttttttttagtggagacggggtttcaccgtgttagccaggatggtctcgatctcctgaccttgtgatccacccgccttggcctcccaaagtgctgggattacaggcgtgagccactgcacccggccaagctttacaactttatttttagggacagggtctcacttttttgcccactactgcagcttccaggagaaaaagttattcgcctctgccgtggaatattctatagcctaatccacgtgagcaaaagacacaactctaccaagatataaaatgtgtactacatatacagtcatgtgagcactaggctgtgacctcgaatgccaacaactatggccaaattactgacagacataagcctgagaactaagccagacactcaacagaaacaagcctcccttttcagagacattttctaaaaccataaaaataagagacaaaaattaggacatattcaggtaacaagagcttccttcccccagataatttctgttgtataaaacccagagattaaaaacaacgatattggattagaaaaaaaaaaaaaaaaaccttagtctttcaataaaaagaagaatgggacaaatttaacccaaaacacatcatcatcatttttcttgaaaatacgatagttcccttttatctgagagggatccattctgagaccccccccagtggatacgctgaaaccatggacaacaccaaactttatatatactatgttttgttctgtacatacatactcatggtaaagtttaatttataaactaggcacagaaaaagattaataccagaacaattataacatactctaatagaagttacatgaacgtagtctcttttctctaaaaatatcttattgtactgtaccactggtaactcaaactgcggataaggggggactgttgtacaacagtctcaccatttgccggtatttccgaatcatttttagcttgtcttctcctcccttgttccttctttctgttcaaggctgctgattattctccaggaggctcttctagctccaatcacattcttatatgtaacagataggaggtttctttcttcagctgtcagctccacatccatccctgctaatttcttcactgactccaccatttctataagggaaaagcaaaatcccgggtccctcagacaaaagggcgggtggaggaggagaagccgagagtcctgctccggcgccgccggagcaccgcctgcctcagccgaccagcgccgtcgactactgggcctagcccagacgagaggagggaaaggccgcagaggccgcgaggatgctgcggaggcgcgggcggccggctgccgcctagttgtgcagcccagaccaaggaaagagaagtgggaggagcggggagctcggcgtcccgcgtcctccgcggctcaggacgactacgctcggcacgtccgggaccctccggccgtggcggttgcagcgccaaaagctcgggcctcagcccctgacgctgtggtgactccgccgcgcctcgccgtcgcccctgtccccgtcctgcccgccgcctccgccgctggggacatgtccaaccccggaagccggaggaacgggcccgtcaagctgcacctgacaggtgagggggagcgccgggccgggctgggcagccgccgggtgggcgagctggcggggggtgcctgttgacttgggaagggccaggatcgcgatcaatggtgagttgggggttggaggaatgggaaggcctagttcagggagagtaattggaaaaccactcgctccggtttggacattctttaaaaagccgaggatgacttggggagggggggtggtcttttgtggaggggaggttacatcggttcgcatcgcaggcggatttcaggtccgaaagtcttggtcaaggagcccgatgctgcctctcggggctcggggaggagcccctgggctaccgcccaggtgggatcgtgaaggggatgaagagctctcgtggcgaggattattgaatccggttgctgactgcgcgcaactttaaggagtgtttactccttaaagatggagcgcttaacggaagtgtgtgcgtgtgtgttcccgggttgttaccttgcacacctacttatgcccgcgtgcaaaatccttactctccgcctccggctaccgctgccggggccgcacaccttaaactcacgtctctctgaggagaggagactgaggttgacttttcccgtgtgcctgtctgatccgacggctcgggctcattgtacactgtgttttggaagtgtctgattgtagggtggcatgtttggggttgtaccttgtaggccgcagaacttgtgtcacttctaactccagacctgctttaaaaacacactttttggcgggggtggggagggggtacttttctaactatgtgctcatacaaactttagagcaaactttctcttactctccccaccctcccccttcctttttctaaatggaaaataatgtccggaggggttgctagatagaagactacacttacaaagtgtttatgattccaggcgcatgaaatctttaacattacaggtacatttttgcttacagtgccatttttggtattcttacatggacatgtcacccccattttaggaaaacttgtatttggtttgaaaaggaattgaaatcacgacgttatcctaccttcaccatttacccctgataaattgtccacgtttatattcggatgagtggtgagaaagataattttccgtagaggatttgtgtgtgcgtgcacgtgtacgaataaactgtaattatgtttgcccacactagactttgagatttatttgggctaattttgtagttgaatgcatgtgtgtcagatcccagtacagctagatgaaaacttgcagtgaatttggtatttgagaatttagcttgaatgtctgttggctgcgatttaaataatacatgaccttcatgacaagttttgctttccctaaggaaaaatgcagggaatcattaactgagtggttcttaatggaaaacctggattggaggatacttgtatttccccccaacttccccccattcaatgtccttatattgggagaagtcagtggaaacctttttaggggatctttgttgctttagagtttatctgttgctatctggaatcagtgatcatcgaaagaacatgcgatcccaggtgtgcagaaagcatcagaaataagctgtttccatttacttccctcaaggctacatagagaaaatgagggaaaaaatagggattttgattttctgcagataaaatgagttgaggttttaagtatgactcagtagatcttaaagtgtttatctgtggtttccgtactgcctatgatacattataaaaatttataagtaaagtttgttaagaggaaagattatgcttatattttaggggaagagggaatattgaactacatttatagagtgattttgtttcaggtttttctgaggattttttaaataccctgtgtccacttaatagtaaaaacagtttgaggtactctgagtttcttacaactatttgtctctgaatagttttctcttaaaatttgacaaatgttaaaaacattgtccttcctcctttggttacagtggagtcttctgttttgccaggaaagtgaactttttttttttcatttttgttcatcatttacaaattagatgggatatattttagcaaatagatctcaagagctggatttaattagcagctttttaggacataaacattaaaggttagatggaaaagattgttttgactgacaggataaatgacagggctgtgtttgatgtgcgtccaggaattggtctggagctggtgcccaacttctcagtccatcttgagaagccaaataaaatatttaacctaggcctcattttgtttttttaaaaaaagttgattctttgtaaaaaccttaagaaatgtttggcatacctttagactaagtgtttaacaattcgtttagacctgggttccctaatagaggaaaaaaaatcacttaaaaaaagacagatctcacagtgaatttatatttggtttacaatacacttgggctataagatgttttaaaattattgttctttgctttaagttaataccatgttagtattttacatttatagagtatctttgatttcaagatgctgtataaactttagttacttggtaataaccttattgtggaattgcccttttactgaaaggtataaacatttcttgcatggtgacacacacacacacacacactctctcacacactcatacacactctctctttctgaagaagaggaaatatttgaaccatgagatcagtgcccacaattgatattagacttttccacatattattctttttttttttttttttttgagacacagtttcactctttttgcccaggctggagtgcagtggcacgatcttggctcactgcaacctccgcctcccgggttcaagcgattctcctgcctcagcctcccaagtagatgggattacaggtgcctgccaccatgcccggctttttttgtatttttagtagagatggggtttcaccatgttggccagggtgatctccatctcccgatctagtgatccgcccacctcggcctcccaaagtgctgggattacaggcgtgagccaccacgcctggccaccacatattattcttaaaaccacaatcagtgaactgtttggtatttgtcagtgctaagaaggtggggctaatttaataatttgatcccaaattttagattcctcaggcaattgggggttagaatccaatttcatccatcaagctacttctgttctttgtgacacattaacatatgatcattaaaatggggtgtatagtaacaccatcaacttcaactaatatttctagaacaaattgattataaagtgtataatttctatattatacctatatgactgtcagatacaggcttttcttacaatggtttggatagaaaaatattctttacagtaaaaactttagggtaatttttagaccattattgtttttgaaaaccaaaggctgcaaaaagcagtttagtgtaatttctaatattttaaattcttaggtatagagaagtagaataagattactcctccagaacatttatttcagacctttttataaatttaatgtttttgtatgctgcttctcatattattaatttcaaagcccttggcaataaggaggttaaccttgtctataatgtaaggaagtttaactttaaaaatttccctttagatatgctagcgtcttaatcttgtttcactacatattttattaattcaaggccttaaaaatgatagctttattctattacacaggtttttatgtatgcctatacaccataatgacatttatttatttatttgagatggagtttcgctcttggctggagtgcaatggggcgatctcagctcactgcaacctgtgcctcctgggttctagcgattctcctgcctcagcctcccgagttgctggtactacaggtgcatggcgccacgcccggctaattttttgtattttcagtagagatggggtttcaccgtgttagccaggatggcctctatctcctgatctcgtgatccgccagcctcggcctcccaaaatgctgggattacaggcgtgagccaccacacccagccaagaaattttttaaatgcaaagttctctagccactttgtatttaccactagatgtctcactaacttcaggaaacctgatagcttttggccacattagagtaacttggttctcaattaaatttttgtagaataatatgatcaggttaagttgaaacctattttttaaattaagatattgaacttgtatttttgtttattgtgttatttaacagaaaggaaacataaaaggctgtgactttcctacttaattaaggatctggaagccacattttgtatggaaaaaggttttcttttatttttttatttcagtagattttgagggaacagatggtgtttgattacgtgaataagtactttagtggtgatttctgagattttggtggacccatcacccaagcagtgtacacagtacccagtgtgtagtcttttatccctcactacccctaccctttcccacagtccctatagtccagtgtatcattcttatgcctttgcatcctcatagcttagctcccccatgtgactgagaacatacaatgttaggtttttcattcttgagttacttcacttagaataatagtctccgattttatccaggttgctgtgaatgctattatttctttttatggctgaatagtattccatggtgtatatatatgtgtatatatgtgtgtgtgtatgtttgtgtgtgtgtgtatacataccacattttctttatccactcattgactgataagtatttgggctggttccatatttttgcaattgcaaattgtgctgctataaacatgcgtgtgcaagaatcttttttgtataatgacttcttttcctctgggtaggtacccagtagtgggattgctggatcaaatggtagatctacttttagttctttaaggaatctccacactgttttccgtagtggttgtactagtttacattaccaccagcagtgtaaaagtgttcccttttcactgcatccatgccaacatctgtttgtttgttttttattttttgattatggccattcttgcaggagtgaggtggcatcgcattgtagttctgatttgcatttccctgatacttagtgatgttgagcatttttccataagcttgttggcctatcttggttggtatatcttcttttgagaattgtctattcatgtctttaacccactttttgatggaattgtttgttttttttttcttgctgatttgtttgcatactttgtagattctggatattagtcctttgtcagatgtttttcttaatccttaattttttttcccccctgagatacggtcttgctttgtcaaccaggatgtagtgcagtggcatgatcgtggcttactgcagcctcagcctcccaggctcaagcgatcctcccacctcagcctcctgagtagctgagactacagacgtatgccaccacccttggctaacttttaaattttttttgtagaggtggggtcttactgtgttgcccaggctggtctcaaactcctgggctcaagtgatcctttcgcctcagcctcccaaagtgctgggattacaggcatgagccactgtgcctgactaatttttaattctttttattttaattttttaaaaaagcaagaaaccagcagagagatttaattcttcaactagtttaataacacccaaagggaaagtatagaaatgtgattttttgtttttgcttataaacataaatttatatgtttaagtagtagagcggaagtaacaagatggagtaaatacttcccaggaggaaatacttcatgaattgagggtggaggtaaaaacattcttccattgaacacatttataaatggttaggtgttattgaaatactatgcataacactcagcttcaagaacaatatagtcaaatagatttaataccctaacttaccaagtttgtttgaaacataacccttaagttttggtcttcctttattatttgaaggtgatagatcacagaatcatagaattggggaactgataggtgatttgtctgtccttgaaccttggcaaattagtatcttaaaaaaattagcattgataccaacatgcaaaatttctccagtcaccaacacttaacactgttttgttgtactattttcagctgtccacaggaaatctactgtattccaatatgtctaacatgtgaagtgtcatttttgtctaacatttttagttccaccttttaaatttttgtcaaaaaaatcattttcattatggctttgggccgaaaactgtattgtcatctttgatacaagtttcttattgatttgtattagatctttcagaatagctctcttaattttcatttcctttccctttccatatgactttcctcgttcagggtcttttcatcctactgttggatgattacaacagcttcatatatggtcgcctctaatctttctttctcctagtgggccctgaataccactgataggaaaatatgactgtaattacagccatgctcaagaacctgaaatggctccctgttatctacctcaatcagtccaagccctattgtctgacttctaagctcctcttactggctcatgcatatttccaacagtatttacttttacaccttagcacaaactctttggttagactcttcaaagtcttttaaatactacattgtcataccctcgttggcgctcttccattgctaggaaagtcctccttttcctgtatgtatttaaagcagcagtccccaacctttttggcacagggactggttttgtgcaagacagtttttccaaggatgtggggagcaggggatgtgttgggatgaaactgttccatctcagatcatcaggcattagattcttgtaaggagcgcacaacctagatcccttgcacgcgcagttcacaatagggttccagctcctatgagcatctaatgctgctgctgatctgacagaaggtggagctcaggccataatgcttgctctcctgctgctcacctcctgctgtgtggcccggttgtaacaggccacaaacttgtaccggcccatggtccaggggttggagacccctgctttaaagcccagatgagttcccctctcccctaaagccctttctttactgttcagattcaagttgttctcctgattttctgagctcttacttgtactcactgttgaaccatgtagtaaatgagaggtaaaatccagcatagtggttaagatcatgaagtcgagagccagatgggtttagcatctatactttagaccctggctctgccacttactactgtgtgaccttgggctacttaattgacccccttgtgccttagtttcctcatcagtaaaatagggaaaataataatatctaccttagagggttattgtaaggattaaggatgaatgtaaagtatttagaatagtacctaacatagtgatatgcgtttacattataatcagtatcactaagcacttgtttattctcaggtatttttgtttctggtttttgtttttgttttgcgtatagtattttttaatctttccacttagatagtaagctcttttaagccagagtgttacatcttttgtttcggtctcatttttcttggtagttattcagcaaaacccattttctaatttgatttctctgtagcctgtgttcctgtataaaaacctctaataagctctcctttaaatgagctactgagggagacatttggaaagaaaaagccatgaatggttacaagaattcaccttcctggggtcagagggctggtaacaacttacaaaaacttccaccttatgaattagtctctagattttggtagtttaaactgggaacattttgaggcagaaacgagacaagtatagttttggtgttttatatagaagtaacttttagtcttttttaaaaaaatggaatattcatttatagctgttaaacttttttaaaaataatggaataatcttttgtagcaaatggaatgtttgtataatctatctcacatgtcaaattattaatttcaaaaatctttttcacaggacttcctgatccatttgctaaggtggtggttgatggatctgggcaatgccattctatagatactgtgaagaatatgctcgatccaaagtggaatcagcattatgacctgtaggtttaaacgattagtttgaaatgaaacatataattaatattacttgatatagtctttgaaaagaatcgtgggaaatgatctgagtttcatctatgctataatttggtcttcacaaaaggtgtaaagaaaagcccagtgggaatgtgctttggtttatagacaggttttgaaagatgaggtatccctaaaattctatgaagaacaaaatgaaactggctcacagtagagcagtccccccaacttttttcaattaaataaaggtattaattcaccactttagaccaattataaaaccagaaatcagaattttgattacactgaataggcattctttttgcctttatgtagagggtttctttcttttaaattttattttaatcataggagtatatgcaccatttaaaaaaggcaaatgatactataaaggttttatggaaaacagcaaggtccctggtcctttctcattcctgattcccatcctcaaggcaactgctctaataactttggctgtttattctggtattttcatctgtttctagatatgttccttattttataccatcacagttttcttttttcagttttatgtaatttttttttttttttttgagacagagtcttgcactgtcacccaggctggagtgtagtggcaccatcttggctcactgcaatctctgcctcttgggttcaagcaattctcctgcctcagcctcccgagtagctgggaatgcaggtgcccaccaccatgcccagctaatttttgtacttttagtagagacagaatttcaccatgttggctaggctcgtctcgaacccctgacctcaagtgatctgcctgactcggcctccgaaagtgctaggattacagatgtgagccactgcgcccagcctagttttagatattttcgaatttcctacatagaagataattcagctttattttttattaaaaattcttttaaaattagagacagtctcactctgttgctcaggctggagtgcagtggcataatcatagctcactgcagcctcaaactcctggactcaacggatcctcccacctcaccctcctgagtagctgtaactacaggtgcatgccaccatgccaaactaattttttttttttttttggtaattttctgtagagatggggtcttcctatattgcccagtctggttttgaattcctgggcccaagtgattctccctcctttgcctcccaaagtatttggattacaggcatggggtatgatgcccagcccagtggttcagcttttaaaattggtattcgtcatccccattcccatgacactcacaagccccttcctttctttaatcttccaatataattataggaacctttttgattaaaccattgttccatgtttacattattatgattatgtaaatatccatagttgggtcacatgggtacaagaattatattttctttcttgacagcttttgttttttctgaagttagtagctacttttcccttttgtttagttttctatttatctcctagctagaaatgagaaattacatgtcataatcctcaaactctcctacagaactaaagatcttttctccatatattcaattctgtcagtattccattggctttgtttcttcttggagatacccctcctgggggtctgtgttctctttcttcagtctggtgtgatggttctctaagacctgctgtgcagttgtcctgggacttgcctttattgttatgttggcaatttcctttgtctcttctagatttagtgactctcttgatttggtgaaccctatcttctgttgtcattttgagaaataatacaaagatggggagaaagttgagatcttatcagaaaatatattttggtttcttatctgttggtatggtttgagtacaggcttctagatgaaatagcactttatctccaaatgttgaatacattgctccattatcttctaggtttagatttgtactgttgagtagaaatataatgtaagccacaaatgggagttcatctgtaattttaaatttcctagtatccacattaagataagtaaaaagaaacagatgacattaagcataataaactgggcatggtggcttgcacctgtaatccagctactcgggaggctgagatgggaggataacttgaggccaggagtctgtgaccacactgggcaacatagcaagacccgtaatacaatatagttatattatgcataataagcataatttattatgctgaaaattaagcataatatatgttatttaattcaatatatcaaaaatattttcaacatggtagtataaaaatattgagctacttatttatgtatatatacatatttactatgtctttgaaaaatcagtggttttctcattttatgttaagaaaaatcagtggtttcttttgcagcttgcctcaatgtggactagccacatttgaagtactcaaaggtcccatgtggttggtggataccattttggacagtgtaggttcagagtattgctgatggcatcctgattttggtctgtcatgactgttgttttccactggaagtttctttattcgtctgtcgcttgttattttcctttaaaaaaattgtagcccccctagtgtgtatgaagttgtacctcgtcatggtttggaagtgcatttccctcatgactaatgatgttgagcatctttgcatgtgctcgttatgttttatcttacagttaatattaattggctaccagaggcttctctcttgcttgtgtctgaggtcgttttgcaaaatccttgcctttaattggctaagtgtacaaacaaaagtctaataattaaattttagccccaaatcctgagtatgtatattatacttttgtctatatggtaacattatatcacccatagaggttaccatctacccctctcaacaaaacatcctgaaacttgtttataaatcatgtatttgttagtgaagtcaaagttttaatagaagctgatagagccctctgtttaactttcaattataaaagtctttactttttcttttatgtggccattatgttatattacatgaggtttcattaaagtgagagcatgtacttctctgtgtataagaaaaggtaatatttctgattaatttctggcccaggaatatttggacagaatgtttgtgacatgtacacttaagtaatacaatatatttcataattttgagtaattcagagttaggctgtcttccagaaggtccataattagcaatttctcattacggtttaatgtagagcttcccaaccttttcatatcatggtacacataaaaaatattatggcacactggactaaacaggtgaagttgcttaagccagtggtgcattgccctgaggactgaggtaatcaatatatgtatttcagcatacctgtaaaccaggcttactagttggacaactggtttaatggacttttaaaaaaatgtttggtttgggtaattcagctacttaatactggattctggctctggaattacatgccagtagatatataccaagatggatcgggtacgtgtatttggaaattggtacatgcgtactgaacaatatttcagttcatatcttttcatttgcaagcaacagagaccaagttcaaatcggcttaatttttaaaaagggaatgtactgatttgcataatgaaaagcttaggggtggccattttttaggcacagctggatcccggggctcaagtgtaccttccatgttccttatttgaaagctttagtcgttacttaagtggtttagtcttttctctatactaggtgaatttttctgatattgctaatttattgaattagcaatactttagactaaaactttgacctcttaatgtcattgaaatagagctaggattctgctgacatgattatgttattatattatctttttgcatgggttgatgccatgttaacaattggctgtggtagagcctttacgtacttgcaggtatatccacagacaagtacagtaatgcttttccctgcactgcttgtctgcaggaggtgaagtgaaatctgcaagagtcctgctcgctcaaggcctgcatacaggaaagaagcaggggaaaagcgttacaaacagcttttgttctacagcattttaaaatataacaggtcagatttttggtctgtcagccttgacactatccgttgaaaagtaggtcatgtcattgaaatgtatttaaaatgtgactgtggtaaaattttttttttttttttttgagacggagtcttgctctgtctcccaggctggagtacagtggcgtgatctcggttcactgcaagctccgcctctcgggttcacgccattctcctgcctcagccttctgagtagctgagacaacaggtgcccgcctccatgcccggctaattttttttttttttttttttttttagtagagacgggatttcaccgtgttagccaggatggtcttgatctcgtgaccttgtgatccgcccgcctcagcctcccaaagtgctgggattacaggcgtgagccattgtgcccggccgtgataaaagttttgaagattctttttcttggaaagaagttatttaataaactcccttagtgttattagacactagctactaaaatagcctttttactaactagaattatagcccagcttgagagtggcagatgtgataaaaatatactaaaattgtttttaaaaattttactttcaagatttttaaaaaatttatattcaatcctgtggattaagtcatgtattttgcataatctagccaggctctgaagcaaattttaactttagggtataaaaagaacaaaagaaaaattttacgcccactgccttataactaccaacatactcatgtagccgttttcatttttaggtatattgaaaagtctgattcagttacaatcagtgtatggaatcacaagaagatccataagaaacaaggtgctggatttctccgttgtgttcatctttttccagtgccatcaaccacctcaaagacactggttgtgagtagatactactgcttttcaaattttatatatatatgtgtgtgtgtgtgtgtgtgtgtatgtatgtgtgcatatacatatgtgtgtgtgtatatgtatgtgtgcatatacatatatacatgtagtatatatgtattctcaaatatatatgaaggatatatatatttgagtatgttggtaggggttcaaacataacttcttgtgtatgtctgaaacattggtaaaaattcctggtctaaatttattttgtagacttaaaaaaaatgaaacgttttaaatatgtgaaacttacagctaaatgagagctgatgcttcatttccagttaatttaaaagtattaagaaatgattgatatctagaatggcaaaaaaaaaaggtgtcaggatttacataccttttaaaatttcttagtacccttttctggttgtggtggatttgtggacaacatgtttttatttaggtgattggggtctttaaggtggcagttaaagagcaattacgaagggataagaatggtataatatataaaactgctgtgacaaaattaaaagttaaagaaagattaaacattattttgagtgtatgacggctctatgaactacttaactgtagctcagtttatcatcaacctgggcgtttagaagattagaccaagatcaagacattagaagtggttttcataatggatttataaggtgacttagcataaccaggtgacggtcttttgggtgggtctttccattggaacataaatgggaattcctttttcaacaggttttctgtgtgtgtgtttgtttctatagaattcttgtgtatataatgtaaaaaatactgttagtctttgtaatgggattttagcccagatgcatatgctaaacaaactcacataagagctaaagaaattaataaacagaaaaggagtaaatttagcattgaatgttaaatatattaagagattgtctcttttaatgtagtatgataccacagcataggtatatattgaccttgtgaaaaagaaaaaggcagaaaactgagctagaagttcttagtccaaggtatttaaaggcatctgagaagttcttgtatttctgggctgacggggtaaccaacaggagagaaaggacagtgggattggaaaaaacaagttgcacataaaaatgaactgttttcttactcagcaaactgaaaaattataggtcaaacgtctgacattatccctagttcaatttagccaatgtttattgaagacttaatgtgctactgttctaaaccctggctgtataaaggagaaagaggcatgaaccctgtcctctgagaaggaagggcaaaggcctgctggcaaagggagcatgccgcatgggaaggactgaataggagaggagttgctctgcagaatccactgtgtagccaacttagcagcacccatttattttgcaaagagaaaagtgtctgtatttttggttggataaccagggactgtagtttaggggcatggatttttctttgtgtttcttgtgactgtttcattgtattaatttatttgacttttttcatgtgcagtaatattgaatttatcaaatatttattgagcacctacctgatgcaatgttctactgggttggagtggaaaatacaaagactacgatatggtctcctccttttatcaattcacaaataagtagacagatggcatacggttgtaaaattattcagctgtaagtactgtaatcaaagtaaaaccagcatgctttgggtgacattgttccttactgtaactttcagggtcaggccagtgttatatctcttttacagatgaggcatctgagagaataaatgagttgctcctgaatgaattagtggcagaactgatgcaaacccagattctacagtttattcttggcttcttattaatacttttttgtgtgcatgtcatttgaaatggttagttaaaaaataataatgacagctaacatttgttgaccattcatgtgccaggcactatgctgtgagttttgcataattatctgatttaatccttaaaaaatatgaggattcacatattgccatatatgagaaaaccaaggctcacggataaattccttaagaccaacaactattaagacagactaaagtggtctaaaagttttggagagaaagtgactgcatgttggcaatgaagtacaccagtgtttcgtagtttttgaaatctgaattctttaaatgataggtttgatttctaatggattgtggaaatttattgtcactctatagacatgagaatctctgataccagctaatgttttcatttctttctttgttgatttcaaatagatcagaggttggatttatgcaaacctgggccaaaggacagttagaagacggtaagtaagtgtgaatttaaagttacatgaattttggtttcattcaaactgacctaaagtctaaataccatttaaatcaaagtatgttaactgtagcttcatagtgttggcctgaattaaatgaatcaggtaaaatgttacagtgaatccaggatccaggttaacttaatttttaaaactttaatgtaaaaaaaaagtgtcatgaagaactgttgatcctttaggaaataattttttcaaagtatcctaacatagtagagcactgagttcagactttatagatgttattaaagtttactgaaaataattctcaaactagtttttttagtaagaagacaacattctattgaacttgttttaatgtttaatgctttacagctttaaaatctatgccaattgaaaaaaacagaatgagcaatgttagtgtaacactggaaaaagggagaaattgttaccttactcatgaggcacttagtagccttatatggtatttaggtgtcttgaattgacctggagggaaaggcttcacataaaatttgctgagacctttcttaagaattgatagagatttgatcaagatgcatagtatggaaggacactgttcatcttggaggcttcttaaattaaagaagaaaaatgttgccgggcacagtggctcatgcctgtaatcccagcactttgggaggctgaggcaggtggatcacctgaggtcaggagttcgagaccagcctggcaagcatagtgaaaccccatctctactaaaaatacaaaaaatttgctgggaatagtgatgagtacctgtaatcccagctactctggaggctgaggcaggagaatcgcttgaacccaggaggcggaggttgcagtgagccgagatcacaccattgcactccagctgggtgacaagagcaagcccctgtctcaaaaaaaaaaaaaaaaaaaaagaaaagaaaaaagaaaaatccaataagactgtcacacttcatgatgaagcagaacttagaataagactattttgttatgaacccatcatagaggttttaattaccgaaggtacttgaaggacttcatttcacaaggcagtgaattgggttcatggagaactaccagggtagccacatagcaaagccctactctggttatcttagggaagtatctacaccagcactccccgacctttttggcaccaggcaccggtttcacggaagacagtttttccatagaccaggctggggtggagttggtttcaggatgattcaaatgcattacatttattgtgcactttattattattacattgtaatatataatgaactaattatacaactcaccataaggtagaatcagtgggagccctgagcttgttttcctgcaactagatggtcccatctgtgggtgatgggagacagtgacagatcatcaggcattagattctcataaggagcaggcaacctagatcccttgtgtgtgtggttcacagtagggtttgtgctcctatgagaatctaatgtcaccactgatctgacaggaggcggagctcaggcggtaatgcttactcacccactactcactcctgctgtgcggcctggttcctaacagaccctggaccaataccccatccatccatggcctgggagttggggatcccttatctacactacagcattactgataattcctgtcatccttagattgagaaggaagcaaaaacaaaaaaaatctcaaaaatcaattcagtcataacagtactttcacatataagtgttccttctgtatttgatttattatgttacataatgcttgccaactactgtctagtagtaacaaaatagttttactagatgtgaatttgcatttatataaatagcagactttgttagacattagaaatatacctactggaggtcaggtacggtggctgacacctgtaatcccagcactttgggaggccaaagtgggtagatcacctgaggtcgggagttcaagaccagcttgaccaacatggagaaaccccatctctactgaaaatacaaaattaactgggcgtggtggcacatgcctgtaatcccagctacacaggatgctgaggcagaagaatcacttgaacctgggaggcggaggtggcggtgagccgagatcatgccattgcactccagcctgggcaacaagagtgaaactccatctcagaaaaaaaaaagaaaaaaaagaaaaaagaaatatacctactggagtatactacatagaaaacaaatgttttactcttaaatatgtgtatatgtgtatatatatgtatttatttaaagctcttgtgtgaatctgctgttcataataggaccattaataagagagagggaggctggactcaaacattatgattctttagttctgtcattcaaaaacagaatgagttccagttctttcagaattagccctctaacaaataattgtaagtaggtatatatactttttggaaaatggagaaaagaacactagaggactaactttaaaaactatattcccctctagtgtctttatatacataaatatgtatataaaatgtatatatttatgtctttaattccagtgaagattaaatttctactttgctttctttcacttaccataatcgtttttagtatttataatctttgtaattaatgatatatatatatatatatatatatatatatatttttttttttttttttttttttttttttgagacggagtttcactcttgttgcccaggctggagtacaatggtgcgatcttggctcactgcaacctccacctcccaggttccagagattctcctgcctcagcctctcaagtagatgggattagaggcatgcgccccgacgcctggctaatttttttttgtatttttagtagagacaaggtttctccatgttggtcaggctggtctccaactcccgaactcaggtgatttgcccacctcagcctcccaaagtgctgggattacaggtgtaagccaccatgtccagccatatttaatgatttttaaaggatgaagtatatagatatatcacaacttaataattaaaaattttttttgctattataacattgaaacttgcaaacatttttgtacactttgcttttttcttttttagaatcattgctgtatgaaaaaaaaatctcccaagttgagataattgattcaaggagtacaaacttttttccttgtttaaaactgtgatgtcccagctacattgggaggctgaggtgggaggatcatttgagcacgggaaatctactgtattggcatcgttatcacttggatgtgtactttttctatgtatttttttaaaaaatgagattatactgaatttttaaaaactggtttaaatttatcataaacatctttgtttttttggcccataaatacatttctatagcattgttcctttttttttcctactttgcattaaggcttgcaaaatctatagcatttttaatgttgtgtggtagtccatggtgggtatgtaattcatttaaccagttaatagctctgctattaacacagcattctggagatgtaaattgaagcccatgaaattctttagttttgaatcttactattattctaaacaaagctaacgagaaaatacattgtttctactgtgattgtattttgataagcatttcacttattttatctatttaaaaactgatggatatagttgtctagcacagttttcataataatgttttgtttacatttgctgagtaggtgtttgtagtgttctgtcctctaaatgggacttaatgtaaaggagctctatgttgaactgatctttcaaaatgttcacagaactggaagatttcagaattttgagacccttctttgaatgaagggtcattagatgtaataatactttttgtgctaacctattatttaagaagttggattatagtcaagtttgactgtacttctttctgtcttttgggagagttactagaattagaattaaacaatactggagcagcaaagaaggacttcagtgatatcaattaagctaactttctcattattcagatggggattatctaaaccttgcttattaagtgttttgttcaagtttacagtgctaaactggttactagagcttgctctagaattcacatctcttgcttcttcattttttgtggtggttttatatactacactggataatggtgtcctgttaaaactcatggaatccaaggattgctctcttgctggaataccaggatggccctcttgctctagaatacagtgtattttttttctttttttgagacggagtctcgctctttcaccaggccggagtgcagtggtgcaattgcagctcactgcaacctctgcctcccaggttcaggtgattcccctgcctcagcctccccagtagcttggactacaggcacaggctaccatgcctggctactttttgtattttagcagagatggggtttcaccatgttggccaggatggtctcgatctcctgaccttgttatccacccaccttggcctcccaaagtgctgggattacaggcgtgagccaccatgcccggcccagtgtattttttagatggtgagattatcaagtattaaacttaatgtggacttttcaaactcctttgtacatgaatatattcttaatatgttatgcctcttcttaagtacagtagtgactctgctatgccctgttactatggtaaagaaggaattaggcttcttccatgaacatgatgaagtgtagaaaactttagaattctaatactactcctaaagggaaaaatctatgggaaaagaaattataaattttagtagaaaccaaagaggtcattctaaagtattaaaataagctaagccagatgtcttctaaagatagaaatttttgattataataattctttctagttgtatgaatcttagtaatatttctatcatttaatagtaagtcttcagtccagagaccaaattggtacaggaagacaagttatggactgcagtcatttatttgataatgatttaccagacaagtaaggtaacatcactgaaatcattagagaattatatagataatatccttaaatggctagaaataaattggtgtttattgtgtattaaatggtgtttactgtatattgaatgtaggtattccttctaatggtaaaattgatggaagatcctgtcacaacaaatttataaaataagccataaattaggtgtgttaaatttggttattaagagttttgactaggagacaaatgaaatttcttgacaaatataactctcttgtaaatattatctagttaaaaaaaagttggtggattattcaaaacaggccatgcaagtgctaaattagaaacattgctgtatttaagagggatgtgatggataatttgtgtaatagtaattaacataacagtaacatttaattgagcatgtatatgtcagataatgttataaacactttacgtacatatcatttaattctcatagcatattggaaggcagtatatagccatgctactgaaatcagaccacctgaattctaagctttactcttctgtgtactggctttatgaccttgatttatttaacttccatgggctttggtttatatttatttacaaaacagtatgagtgataatagtacatactccataaactgttgagaggattaaatgaaataattcaggtaaagcactttagtacagtgtctttcataaaataagtgcttcataaataattagctactattatttctatcgctactactattgttaccctcaaaaactaagagttacagaagttaagtaatttgcctaaggccacatagtaagtggcagagccaaaacacacaaacctgtcttgattctaaagtcatgatttttatcattggtctctttgatactagttctgactcttttctgattttatttttaacattcaaagtatttttaattaatatcaatgagatataacttacatgtaataaattgcatccatttaagtgtataaatggttaaattttaactccaattattttttatacaaaattttatacccaggttattatgatatttactcattttgtttaaactgttaaaaatcactataattgtttttagatcactttagcttccagatatgtctgttagctcttttacagatgtgaggtagattatggtatttttgaaaaggaaatttagggccaggcgcagtggctcacgcctgtaatcccagcactttgggagcccaaggtgggcggatcacgaggtcaggagtttgagaacagcctgcgtggtaaaaccccgtctctacttaaaaaaatacaaaaaattagccgggcatcgtggcgcatgcctgtagtcccagctactcgggaggctgaggaaggagcattgtttgaaaccggcaggcagaggttgcagtgagccgagatcgcgccactgcactccagcctgggcgacagagcgagactctgtctcagaaaaaaaaaaaaaaaaaaaggaaatttaggatgaattaactaatcaatattgagagagtaccaggagtaataagacttattgttctaaacttgccatacattactgtactgtaattgtaatcatggggaaaaaaaccctagcaactctttattttcctttttttttagagcccttcaacctctgccaatatctttgtaaaaatattaagattattacatttctatagtgatttgcctcttttgcattaaatgaattatgatacagagttgatagaaagtagcggccttgcccgggcatggtggctcaggcctgtaatcccagcactttgggaggctgaggcgggaggatcacgaggttaagagatcaagaccatcctggccaacatggtgaaacccagtctctagttaaaatacaaaaattagccgggtgtggtggcacgtgcctgtagtcccagctacttgggaggctgaggcaggagaatcacttgaacctgggaggcagaggttgcagtgagccgagatggcgccactgcactccagcctggtgaaagagcgagactccgtctcaaaaaaaaaaaaaagaaaagaaggtaaccatcttgattttttgtttgtttgtttgtttttagacggagtttcactcttgtcgcccaggctggagtgcagtggcgtgatcttggctcactgcaacctccgtctccctggtttaagcgattctccagcctcagcctctggaatagctgggattacaggcaagtgccaccacgcccagctaatttttgtatttttaatagagacggggtttcaccatgttatccaggctggtctcgaactcctgacctcaggggatctgcctacagtagcactccaagtacccacccagcccagttgctgcagattccttccctatctcctctgtcctccccccttgctcaatcctgtgctgtgcatcctgctccgatctcctcccaaccccgccgacccctgaaacgggaaatacgaggacacatcaggtggcaaaaatactagatttacaagaggaaagaggtgcattgttcaaaatggagattgcattgttgcagtttgcaggccacactcgctcactgtctctcccccaccaaccaacccctttttcctcttcaaaaaatttgtgccagtgcagtgtctgcaccgggcaggattgaaactttggcaaacatatccattgcattcatttttctccccttgttttggtgtggttttctggaatgaaagaagcctcttgttttgcaaacctctttgcatttctaatgaggtttctttcggatttttattgtatatctgttccttaaaagagaattaaggatttggatggattgtggcacacagacacacggaaaaacttgcctgttttcacacccctggctgtggtttttaaattgtgttaaggaaacggatcatttgggttagtaggggaaccttacctggtcctgtgtgtttgtttttattcttctagtgctgatgggcccgt[450 bp omitted]ccccccaccccccgcgctccccaaggctgctttgtattaaatacgtagttgcaatttcctaaatcgtgaaattaagcgaagcaacaaccggcaaggctttttcttcatagttttgcaaatctatattaattaaattagaatctggttttaaaagcatttaaaaaacaaagtttataaggaaatctttgtgaggaaaaaggacccttttttccttgaagttaggcatgtcatgtctttttcagagagactagggtagtagaagtggttaaattgaaaagtttctgttttttaaataaatgcttaaatacttattggagaagtagggtagtattatattaagccaaatgtaaacccatgtaggttgtcctaacataaactgaaaagaggtaatttcttgtgcccagtggtcagaatcgttgccagacttgtccgggggaggctggctggagaatgaagggaatgaatgaagtgtcaggtatttatgtcttatatgtagaaaggactgcatgtaaattcttggcaacttaattttagtcctatttttgttttttttgagacggagccttgctgtcgcctaggttggcgtgcaatggtgggatcttggctcactgcaacctccacctcctgggctcaagcgattctcctgcctcagcctcctgagcaactgggagtacaggtgcccaccagtacgcctggctaatttttgtatttttagtagagatggggtttcactgtgttggccagtctggtcttgaactcctgacctcaagtgatctgcccgcctcggcctcccaaagtgctgggattacaggcatgagccactacgcccggcccttagatgtgtcttgtgctttgcatgcaagtgtgtgttagtaatggacttcttttataaaataattttattaatactagaaaagcgtatatatatatatgtgtatatatatatatctatagtgtgtgtgtgtgtgtgtgtgtgtgtatatatatatatatatatatatatatatatttttttttttttttttttggacagcctctcctctcaggctggagcgcagtggcacgattccaactcatggcaacctccacctcctgggtcaagtgattctcctgcttcagcctcctgagtagctgggattacgggcacctgccaccacacccagctaatttctgtatttttacaaaaatttggactctgcttagattggcttagttttctctttagtcaaatcttcaggaaccaatttattaccattaaaaatgatctaacaagctttatttttattattgttaaaaatcctcattttgaggaacacaaccacaaagtaaagaatgttttcattgatttaaccagtaaaaatcaatatttaattataaaattttttttttcttcagctaaaacagcggaagaggtgatttattatatggttgttacactcggccacaaataaacacagaaatagtccagaatgtcacaggtccagggcagaggaccaacatgggcattttgtttatgagcaaggtgggtctcagaggtgatcggcgatcagagggcgatgaagttctagatccattgagacaagctctagacagtagcatgcagtcccacaacttgtaccagcatccccagcatctggcattccatgtttctgctcctgtggcctccacagtgcaacaagctagcggtttacttggacctctacctcatctttcttcttttgcgcttcagcctgcgcattcgcttcttcctccacttggctctcatggtgcaggtttccaagaaaatggcgctaaggccgagagttaataataaaatatttaaaacatggctccaggccatccagatgccttaacttgggctcaggctcctgatactgatgggtcttttatcttcctctgatgccttttctgtgaattcacctgttttggaagaaaacacaattaaggttatctatcacaacaaccactatctccaatgtgtattcattccttttattcattttaagtctcatctacctgatgagataacttttttgaagacaggcattatatgctgtttaacagtactttgattcttccacagttcagtcatccttgctaccttgcagaggactggttctaggatatcgcccccacaccataccagaatctgtggatgctcaatcccttaaatataatggtgcagtgtttgcatataaccaacacccccgcccccatatactttatttatttacttacttagagacaggatcaccctctgtcactcaggctggagaacagtgtcacaatcacagctcactgcagcctcaacttcctgggctccagtgatctgcccacctcagcctcttgagtagctgggactacaggtgcataccaccacacctggctaatttttttatttttatttttattaaagacaaggtctcactatgctgcccaggttggcctcccaaagtgttgggattacaagtgtgagtcaccgtgcctggtcccatgtacttgaagtcatcactaacaaaatgtatagatattgtataatggcaacagttgttatactgtactttctatttgtatttttattttttctttcttcaaatattcagcctcatctagttgaatctgaagatgtggacctgctgatgaagagggctgattgtatctaacttagggtcttgcatgcagctggcacttaatgcattttattgactgttttagctaacattcaatggacaattcctaataaaaaactccactcccaaaagtatgaaaaagtgcaagatgtgctttgttaaacagatgcttgaaggcagcatgctcgttaaaagagtcatcaccactccctaatctcaagtacccagggacacaaacactgtggaaggccacagggtcctctgtctaggaaaaccgagacctttgttcacatgtttatctgctgaccttccctccactgttgtcctattaccctgacaaatccccctctccgagaaacacccaagaatgatcaataaatactaaaaaaaaaaaaaaaaaagtatgaaaaaaaggaaacctgctctaaagtggcaggaaaaccagcctgggcaacatagcgagatcttgtctctacaacgaaagttttaaaattcactgcctgcctgtagtcccagccactctggaagctgaggcaggaggatcccttaagcccaggagtttgaggttacagtgagctagatcacaccattgctctccagtctgggtgacaacaaggccctgagaaagaaaaaacaaagaaaggaaaggaaggaaagagtgtaagtattgaaaaggaagagacaaaactgtcattatttgcatataaaataataaatgttagccaaagaagcctaagagaatcaactaagattttactggaagtaatatgagaattcagtacggtggctagaaacaaaatcaagagagcagcacacaaacctcaaatgcttttcagatgtaccaccaataactaactagaaaatggaagaaagatcccatttacaatggcaatacaaatgtctgaagtatttaggaacaaaaatacaaagatctgttatctaacaaaagacgtgtaagatctatatgatggaaaccctaaaactcttctgaaagacattaacaagaaatgaatacatgacatgaaataccatgttctagaatgtcgtacagatgtcaattctcaaattaatctacaaatttaaggtaatcctattcaaatcccaagatagtttttggtggtggctgtttttgagacaaggtctcgctctgttgcccaggctagagtgcagtggtatgaccacagctcgctgcatcctcaacctcccaggctcaagcaatcctcccacttcagcctctgaagtctcttatatggtgtccaagaaatggggacaaatctcacaaagggactaggctcaggagggctggaatattcagggaagtttcttttttttcttttttcttttttttttgaggcagagtctcactctgtcccccaggctggagtgcagcagcccgatcttggctcactgcatgctccacctcccaggttcatgccattctgcctcagcctcacaagtagctgggactacacacgcccaccaccacacccagctaatttttgtatttttagtagagacggggtttcaccatgttgggcaggctggtctcgaactcctgacttcaggtgatccacccacctcagccttcagaagtgctggaattacaggcatgagccaccgctcccggccgccagattcttatgtgggactcccactgttttaaagtgcttagtaaaggtggtgagtttaagacatttgtattgatgctacccaaacctcttggtggagggacctaatgagcctgttctccggtgtgagggcaaaagaaaaacagaccctcagtgtgtcttccctaagttaagcatcagcaaattaatgaagacagagaggagcatctgcagaaactgctgctctaatccagacacatcctgaacacctccctctacctcaaaatgaactgtgtgaaactagatttctgaaccacaggaaaggtggaaagtattttctaaagtcagatgtagaggagaatcttcaccttgagtctaaagtccccttcaggccattgaatatacccactctgatttgctgggtatgttatacagagaaatcatagaatttttgcacttacggtagaagagtagtcaggaaagtatatggaattaaaatagagcgacgtattttctttacaaaatttttttttgcacaatagcttaacataaacaccattttggccaggcatggtggctcacgcctgtaaccccagcactttgggaggctaaggtgggcagatcacctgaggtcacaggagttcgagaccagcctggaggggaggttggagtgcagtggcacaatctcggctcactgcaacttccacctctggagttcaagccattctcgaccctcagcctcccgatagctgggatcacaggcgcctgccaccacgacctgctaatttttgtatcgttagtagagacggggtttcggcatgttggccaggctggtctcaaactcctgacctcaagtgatcctcccaaggtgctgggattataggcatgagccactacgcccagccctacactttggatttaactttgattcctgcccatatgcagagtttcaaactgcttaaatgtctgcaacatttagctgcaaggaagaaagcttaacacaaagtcctccagggagcaaaaaactgcatcactacgcccagctaattttttttgtattttcagtagggatggggattcactatgttggccaagctggtgttgaactcctgacctcaggtgatccgcccccctcagctcctaaagttctgggattacaggcctgagccacctgcccagcaacaaggctaatttgagggtcacttgtttgatgccttttcttgcccatgccataggtcagaactaggacaagcagagcaggtcatatataagctgtgtaagtctcttggctgctttgtaccttagtttccccatttgagaaaaacgaatggatcttaagacacacttttcagagttcataatgggcttatacccagctaaccaataattgtatgagtttttatacaaaatagttgtttacacgtattcatcttctatttcacttacaagttgtgtaaaaactgcattccgtgccaggcctgaaatgttccaaggctcagttctgtaattaaattgcagcccagatttctacaaaaaaagacataagccaaaggaaaaaaaaattatttcagaacatttatcatttgctgtgagtctaatttacataggatggaacatcacctcaatcctttctctgtgcactaaggcaatctcactgtggaagatactggcttatgatttatactttaatattgcacatgtggtgcattagctacaaaacagtgaacgctcagtaaatacctgtgttaagtgatcttcatttctctagaacaggatttcacaacttcagtaccatcgacattttggactatataactctttgccgtgggggtttgtcttacactctgcaggatgtttagcagcatctctggcctctgcccaccagatgccaggagcacaaccacagttttgtcaagcaaaactgtctctggacattaccaaatgtcacctgagtacaaaatcacaccagttgagaaccactgctctctgatgattcactatgatctgtgtaataattctcacactaatctttgctagagacaaaaaggacttgctatataattttagtacctttctactggtcaaattttaatcatatttcaaaatgaatagcaaagaggtttataattaagttttataaaaattccaaatgtaataaagttatatttgtaacttacgtatactgcaaaaatggtagtgattcaaatgtttgtctttcaatataccgtattttattgcaggatgaatctccaggaaaaataaaaggaaaatattgccttgataagttatcagtgttgactagtatgaataatagcaagagtttagaataatattgaatacacatttttcatctcgactctaaacatttggacctgtagttgaactttccagagcccctaaccctgcctgtacctctcctagagtctcgccttcatacttttaataaataaaatatacaacttaatagactttggaattaatttctcctgagagcagtagacttgattagatgcccttttgtagtctcatcaaatcctagagtatgagctcaaagcttttatctgtatatatagttactaatattaaaacgaatagcctcacatttatacaccttcctagttgaggtttgttttcctaagccagttcagtatcagaagaagtaaaagacatcctttcaacagcatttgaaaggaagttacccctttacttaatacataactttgaactaatattcaaatcatattaatacaattaatttctatcatattaatagaaattcatttttggttttatattgctttaatatttcatgaaagcaatttcttcagttatacagagatggggcttttccctccctctttacctggatggtgtaacgttgtctggctgatgtctccatctctagtctctcccttcctaaactatcctccacacagtcatcatataaactctccagaagtggcttgcaaagaccagcacctcctgggaaattattgaggatgcaaattcttggtcccactctagaccaactgaatccaataactatgagggcggagtccagaactgagttctaacgtgccctctcaatgattgtgatgcagatccatcttacagcactgctgtgataacatggttccccatgatggctccgcagcttggcattcaaagccctagaagatctggctccaatttcctactctccctccttgtaatctacaggtactcatggcattcctcgaatactttcctgtgttttgcccttctcccatttcccttttgcaagtttagaatattgtccccaagatgtctgtccgatgctacacaatggcccttcaaagtcctattcaaatgggattgttctagtaacagcttcctgggtccaaactgaagtcattttcccctcttctatgcttcagaaacaatttatccctcctagtgcccacatccatttcttcttattaatgtagttatttttcatcccattttttctgagcataaactccttgaaagcatggactaggtcttgctcatctgcattgcccaccatgtttaaaactgacacatggaaatagtaaattcaaatatttgtaaaacaaatgaatagctggccgggcacggtggctcatgcctgtaattccagcactttgggaggctgaggcgggtggattacaagatcaggatatcgagaccatcctggctaacaaggcgaaaccccgtctctactaaaaatacaataaattagctgggcgtggcggcgtgtgcctgtagttccagctacttgggaggctgaggcaggagaatggagtgaaccagggaggcagagcttggggtgagccgaaatcgcaccacagcactccagcctgagtgacagagcgagactccatctcaaaaataaataaataaataaataaataaataaataaataaatagctgggggagtgagtagaaggaaaatgattattttaaagcaaatgtagttttattacttcatggcctctgcagcactttggcatccacttgagggtctttacacccactttccttaagcctttcacatttgaaagaatctgtctgcaaaagagcatcactaataaggattaatgacatacacacctctgcggacagaggataagaatcaagctttcatagcaattgaacatagtatcttcttgtctctaaacagacagaaatactatgcaggtatccctttcttggtaacagggctggggagatagttactgtgtaattagtgaagagttaggggcatttctgatatgcttcttactgtaaacatttctagctctaccacttaaccatcattttaaacatctgttttaatataacaattcctgaaatgaaatccttaatactagtctattctcttggtagcttaatattcttgataatattatttctataattcagctgatttcaaatatttaaatgttaatttaattccgattaaattaccaaaaaattctggattaatgatgttcaaatgaatgtaggtggtctatattttcttctcctttaggcaacaatctgacgttaactttaattcctttcatcctactaaaccaactgtttcaaatctttttttgtgaaggtcagacagtaaatattttaaggctttgtgggccacatatgatctctctcacatatttctctttcttttttctttcacagtcctttaaaaatgcaaaaaccattcttaacttaatgggctattaaaaaatagaccttaggttagatttgatctattggctgtagattgaatagaagaagatggtatgtaaacccttagaaaacaaggttcatatgggtgtcagtcactgctcagatcttcttaccatgtgaaattttttctgtcagtattttgtctatacaatttaaaaactgaaaatgcataggacatagcgaatgctagagatgggctgagaccctatacaaacttacagaattgcagaattttattgctggaagaaatcttagagattatctaatttgaacctcttattcattttaaagataatatgactaaaaactcaaaaatatgattaactaacttacaaatactggagggatagcaggccttcaaatgaatccttaggtaattcagtcaaataattttcactgagaattctggaaaatgaaaaagttatttctaggttaaaatgcaaactacaactatttgctacacaggactatctcctgcatgtggaggaaagctgggtcatggtcatttcaagatggtgggatctgctctgctttcgttcaaaccttttcttccattttccttttcgtgtccatccctctccaccaccaccaccacacacacaggcaagcacacacacacacgtgcaagcacacacatatgcaagcacacacacacatgcaagcacacacacacaagcacacacacacaggcaagcacgcacacacacttgcaagcacacacacacacgcacacacacaagcaagcacacacacacatgcaagcacacacacacaagtacacacacacaagcacacacacacgtgcaagcacacacacacaagcacactgctccactcttcccaccaaattgtatctttaatgactcctctctagatcataatatacctttcagaatccaactctgggtggcaccaagatcagcagaacctccatttcctcctctcttttcccaaaccttattacaaaagccccacatgggaccatgtcagggctgcaagtgaagccattcgacttttgtcccccatcaaaaaaatttgagaactacaatgtgcgtaaagtgcacataacataaatgttgtttatctttaatttaatttaacttaatttaatttaatttctgagacagggtctcattctgttacccacactggtctcagactcctggctcaagtgatcctcctgtctctgcctcccgaagtgttgggattgcagacatgagccacctcacctggccaaatattcagtttaataattataaagcagatacccatgtaaacattgttacaaaagattattgctagcatcccagaagccccagtgtgcccctttccaaccatattcctctctctaaccctagtaggtaaccactactctgacttttgtaatgactttcttgcttttaaaatgtagtcctggcctggcgtggtggctcatgcctgtaatcccatcattctggaaagccaaggcacatgaatcacctgaagtcatgagtttgagaccagcctgtccaacatggcgaaactctgtctctactaaaaatagaaaaattagctgggcatggtggcgggcacctgtaattccagctacccaggaggctgaggcaggagaatcccttgaacccgggaggtggaacttgcagtgagccaagatcgcaccattgaactccagcctgggcaacaagaacaaaattccatctcaaaaaataaataaagcaattctcctgcctcagcttcccaaatagatgggattataggcacccaccaccatgcctggctaatttttgtattttcagtagagatggggtttcgccatattggccaggctggtctcaaactcctgacctcaggtgatccgcctgcctcgacctcccgaggtgctggggttacagctgtgagccaccgcacctagtatgtgtttgatttttaatttagaactcatgtatgtcttgtctatataagtcaaactaatgatgtgacagaaactgttgtgaaaaatgttactttgaatgtaagcatttttccaaaatcatttatgtgtctcaactaattccttctataaatcaggaagacaacgataaaacaattcaacaggaaaatgaacaaaggacagaaaactcagaggagaaacacaaatgttcaataaacatataaagatatttaattaaattcatgagtgatcagaaaaattcaaatttggatggaatcccttttattcatccataacttcaacaaaaatttggtgaatacccaacagtgaaaaggtgtggggaaatgaatgctgtcacattctgctgacaatacagtcagttggcacaacatttttgaggacaattaaaattttatatctacatagtcttcaccccaactcttccatttctagatatctatgctataggaatacttgcccactaagcataagctcaacattcatcaatggggaaattattaaataaactctgatgcatccatactatggattatgcaggagtttaaatgaatggggtgaccctctaagtcccaggaaggaaagaaattatgaagtgaaagaatatcatataagtgataccatgaagtgaaagaatcaagttgcaagatgttaccctttatgaaaagaaaaaagattttaaaaaccacacaacaaatctattttgctttatgtaaatatgtatgtaggtaaatggggaaaagtctggaagcatgtatactaaacacacagtagcattacctcagggacgagaaagtagggcagaaggagggtttttgttatacctgttattgcatttttatacattaaaaatagaatcatgggctgggggtggtggctcatgcctataatatgagcactttaggaggccaaggtgggaggatcacttgagcccaggagctcaagaccagcctaagcagcataggaagaacccgtctctacaaaaaatacaaaattaggtggatgtggtggcatgcacttgtgtgtggtcccagctacttgggaggctgaggtgggaggatcacttgtgcctgggaggtgaaggctgcagtgagatgtgattatgccactgcactccagcccaggggacaaagtaagatcctgtctctgaaaaaaaaagagaaaaaaaagaatataaccatgtattatttgtatgataaaaaataaatttaaattgcctcttagagagagcttcccaaatttaattttaaaataaccataggattgcaatccacagaggttgatttcgggtatggaggggaaatatcttttctcagaggtatagacctcaaaattctggaccaagaaggatcttataatgcagttagttttttgtcatatttggagagaatatactcacagtttctcggtccaactgtatgctttccatacatttccatcaatgtatgaaatatagtttccttggaaatttctgtgaagaaagacagtttatatccttgaataggcaggaaaagaatgaacaggataaataaaagaatcatggcaaccttgtcggggatattcggaaacagaaaataacacctgctttctcatttccagagctatcagcttcccagtttgcacaattcatcaagaaataatgcagggccgctggcacaaatgatgaggcatctcccggaagcttaacttcctatccatcccatctcttggacagacgatgccagttaattacgttgaatgtaagtattttatccaaaagcacttatgtgtctaaacaaactcctacaaatcaacacaaaaatggtaaataattcaacagaaaaatgggcataagcttatctttatcgataaataagtagaaagaaaccctatgccaggtaacaccaaagctttgccctctgttgaaacatcctaggctttttctttccactcttattacaactgatctgatttagccccttcacactttactcctacattttgctagacctttctattttgtctccctgaaataagcttttccttttgggcactctacatatggattctaaaataatcctttgcatgtctatacttgaacataaagcaaaaaaaacaaaataaaataaaataatcttcctgttttaatcatttaatctctcttgcttggaaactttcaatggctttccatacctcattgtgtactctttaagacccaagtaaacttttagcttatccatgtagctttccctgatctccacacctcaaggaccacagattctggtaaattctagcaacgatggtatgcattatctttcaggaattaattatatacaccgccctttttatgcctattctctttcttccctcctatcatcttcatgttctgcggacaatagcatactttgtcctgggtttgtcacaaaatgagtgctacatataaaaagccagggacaaagaggagttctggacataactaaaggacagagtaatcatgttaacagccaacactcctacatatgctaggcactgatgaagtgtttcatatattcactcacccaaatttcacaacaatcctatgaaatggtaactagcataatccccagtttaaaaggaggaaattgagtcacagagcagaataacttgctctggatcaccaagctaataaacagacctgggttcaaacccaggcagcctggctccagaatcaattcttaaccacttagagcatcatcactgagatcgggagagtgacaggctgctgtaaagaaggtgaagcgggccaggcgcggtggctcacgcctgtaatcctagcactttgggaggctaaggtgggtggatcacctgaggtcaggagatcaacatggagaaaccccgtctctactaaaaatacaaagaatgttttttgtgtgttgccaggtgtggtggcacatgcctgtaatcccagcaactcaggaggctgaggcaggagaatcacttgaacctgggagatggaggttgcggtgagccaagaccgtgccattgcactccagcctgtgcaacaagagcaaaactctgtctcaaaaaaaaaaaaaaaaaaagagggtgaagcgaaaataggagcagagcagcggttaagcaatgatgtgatggggtaaataagaatggataagaaaacgagtaagagtaaaagactggagaaaaagtaaaagactggagaatgggtctaacattaaaggagaatgaggagaagggagaattgacaagcaaaggtgaaagcagaaagtcagttgtcagtatggcttggggagataaagaaggccctggaaggcctccaggaaaaggctgccatgtcaggcaagacacagaggatgattgaggaaaggtgattcttacaaggtggtgaagatgccattgtaggtgtagggctctggcacaggcacttggcggagcctctgctttgggctgagaccaacacatgacagagtctcatctccgcaggtgcagagctcacatatgttggtgcctgtggaggccttctgttcctctggtgcagtttcagactgcaccaatgaatcctgcgaagattctaactttgtaggtggacctgtgacttcagtcaggcttcgatgcagagtctgaacctggtctggatgaggagctctagtcttctccagggctgtggaatgtccaatctctgtagtaggttctggagttatggcaagccccgggtctagaggctgagctgaggtttcctccgtggttggagatggtttaacctctgtagtaggctctgtagttatgctaagctccaggtccagaggttgaactgtggcttcggtcaggtgtgaaagctgagcctgacccttgtctgaaggtgaacacctcagggtgttctggaggaggagctgtagtcgtcagggctgtagaagattcaacctctgttgtggattctggagtgatggtaagctccagatccaaaggttgaactgtggcttcagtcaggtgtgaatgctgagtctgaaactggtctggatgtggaagtatcaccttaaggtgctttggaggaactatagttctcttcaggggtgtagaatgttcaacctccatagtgggttctggagtgatggtaagtcccaggtccaaaggttgaactgtaatgctgggtgacattggatgctgagcttgatcctgacctggtgttggaatttttacctcttgatatagtacaagttgttgtagagctttcttaggaggctgagttggggtctcctgcatggttggagaaagttcaacctctgtcgttgattctggaatgatggtaagtcccaggtccaaaggttgaacagtgacactgggcaatgttgaattctgagctggatcctggcctagtgttgggactgtcacctcataatgagctggaggttgagctgcaacttccttaggtggctctggaagctgaactgggaccatttgctgccttgaagattctacctccctaggggactctgcagcctgaactgtggcctcctgctgggtcagagaaggttctgcctccacagggggctctggaatctgagctggaacctcctgctgagttacagatggttctacctcctgagggaaccctggaggcaaagatggggccatctgctgggtcagagagggttctatcaccatagtggggtctgaagactgagcagggactgcctgctggactggagaggattctacctctttaggtggctctaaaagccaagttggggcctgctgtagactggagatgggtcaaccttctcaggtggctctgatggctgagctggtgtctcccactgtggtggaggactgaccgcttcagtggacttccaaggatgacctgaggcttcctgctgggttgcagatggttcaacctccttagggggctctggtggctcagctgggaactcttgctggactggagaaggttctgcctccttagggggatctggagtctgagctgtggcctcttggtggactggagattcaatcttctcaggagaatgcagaggtggggaagggagatcaggctgggttaaagaaaagtcagcctgctcagtgggaatagaagggttgtcctgctggactggagaaggttctacccacatagtgactgctgtaggtttggtaagctccctatctagatctagatatgacacatctggaggtgaacctattgcttcatcatccattgaacttacaaagtctgaggagagctgagttggaggctgagttgtaggctctttatggactggaggaggttcataattttcaggtctatttagctgctgaattataatgtcttgctggtctttcaaatgttgaaactgctcaggggacattaagggctgagctggggcctcctgctggattggagaagactcaccctcctcagcggtctgtggatgctcagctgcagcctcctgctgggttggagtggtgttctctttattaataggttctggagattgaactgaagtttcctgttgaatttgtaaatgtccagcctcttctgatgactctggaggcagaggtgggcacccgtgctggatggcgggaggttctacattacctggacctgagagctgagctgtagcctcctggtggactggagaagtttccacctctgcactaggctctgttgctatagtgagctgcacgtctggaggcttaacagagacattgggaaaatctgaatgctgagtttcatggtaacctgaaggtgaaactgggacttcatgatgttctgggggctgagctggggtctcctgctgggttggagaagattcaacctccccagaagactcagaaggctgagctagctgctcctgctcactgggggaaagttcaggctctataggaggacgtggaggctcagttggggcctcctcttggaatgcagatggttccatctcttctggaggctgagctggggtctcgtgctgggctggagaagattcaacctctccagaagactcagaaggctgagctggctgctcctgttcactgggggaaagttcaggctccataggaggacctggaggctcagttggggcctcctgttgggttgcagaaggtgccacctcctctggaggctgaattggggcctcctgctgggcttgggaagattctgtctcatttttgggctctgaagtcatggtaacttccacatctgcaggtttgactgtaacgttgggaaagttgtaatgagcaacctggaggttgaactgtcacttcatgattcagtggagtttgagctagactctccatagaggactctggaggcagagctggggcctcctgctgggttgaaggttctacctcctgagggagcagtggaagctgtgctggggtttcttcctggagtgaagaggactggatgtcttcaagggtctctggattttgagtttcaggctctagatggaattgagaaagtccaacttgctcaggaggccctggaggctcatctgcattcacccggagttctggaggcaggctgccggaatacagtgtgtccatactcaaatattcatctgcaaagtctgtttctgacgctgaggtttgtataattggtgtggaatcccgacaatcttagcaaggctccaacgctcagctagatctttcttcaagttctttggaaaaacaacaaatttggttggttttgaaaccttactgtctagcggaacaagtatttcatctgcctgatgacctgcagcccgatctagatctgcagtttgaaacttacttttgaggcgaggaagctgaactagggtctggttctgatccctgtccagcagtggaaccacctctgggagcctttcttgtggagtccgcttgtcatttaaatcctgatgtgcagccaagaactgctctggccccaggggcagctctccacctgaatccgtatccaggaatggaaccaaattttcatttgattcctggggcagggctgacacctgtgaggaagcagagggccccaggtaatcaaagtcccctggggctgctgggggagcaggtgcatgaggagattcccatgggagatgggaggagcgggaagaccagggctcaggtgaccccaggggttagaggtcagctggagcgggtccttgaccaacaccagatgtggagcctccttgactagtagacacaataattgccactaggagacacaatagctgccacgtaaggaggggccacgggccccagaaacgcagccaggacatgacacatgctagtgccgtgcactgattgggagccattctggcagccctgagatgctcatgccccttataagcgtgcgccccgccctgtctttatgacacctttatttatgccacatttatttggctcgggtccagatctgctccattttaccatggcaatcttatgtcacaatctcgctcaagtgatcctcccacctcagcctcctgagtagctgggactacaggatgtgccaccacacccagctgatttttgtgttttttgtagagacagagtctccctatgatgtccaggctggtctcaaactcctgggctcaagtgatcctcccacctcagagtcccaaattgctgggattacagggattagccaccatgcccagccaatccagccatcttgcagccaatcctccagccccaattaagccttcagatgactacagccccagttagtatcttgactacaaactcatgacagatcctaagctagaaccactcttctaagctgctcctgaattcctaacccatatacagtgtgtgagatcataaacacttattgttgttttaggcctcaaattttggagcaatttattatgcagcaataggtgactaaaacacacaataaaattgctgtcattactattataaagtacttcctgattttgagctgaaatccactttcttgtaatcaccaccctctcttccagttccgtctttttgggccacctagaaaaaatacaatctctcttcctcatggtcaaaatgtttggtgccagttttcatgccaacaatttaattcatcagacatttgaagagtgatcactgtaccaggcagtaggcatgcaaagataagtaggacgaggtccctgcctagccatacactcaaaacattcttccacaggaggtgtgctgtaatgaagggacctgactcccagtgcaggagaaggaggtccaaatgcaggtgtggctggttctgcttacagaggtgagggaaggcttctcagaacaggtggcaggcgctgaggcctaagggatgaataggccttctccaggatgacaggaggggaaggactaacaagcagaagctgcaggcagaagaccaccctgacactaaccactttcttccgcagggtacacatctcctctcctcttgtccaacttttgagtcctctcccaacccctcccaatcttggtaactccactcagaacacaccctttcctgtcacatgatggcatctagagggagccagccctcctccagggtggtccggccagtgtggagtggagttggccgtcacctttctttttctggaagctctgcttggtccagacttgtctgaggttttttggcctccacatccttcagctgactcatgctgggcctgcaggcatctggactgcaaagtcatttttcacacgtgctcctgggaaaccacatctcttcgtactttgtacttctgctgttgttttgttttcacaatttttcatgggtgttttgaagttcaataatttgatctatgcaaactgctcatctcagctcctggttggcaggggccttgtggaagcaaattgagccaccaaaagaatccaatttagaacacgccctggaaacagaaaccgtctgtcattctaaggccattgtggttgggagtgattcagactcattgcagctccttccagccttcaaagatctcaccggataagagcctggcttggatttgaagacaccttctatgaaggaaaggctttggcagggggtgaggggggtgggctgtgatactttgtaggagctgagcacagacggaaggaaattggaaggggatgtttgtctggctcccaccttcccccgtcagggagaatcaggccattgtctaggtagaactcttggcttgtttatcttctcagacccagcttagaacaaggtttcactcagttttctttccacccaaaaaatgaccacaggaaagagtgacttgcgtttgctaagtgtccagtccgtactctccgttcccatttctctgcctctttctcccattatcggcttctaacagaaaataagaagagcaagcttccctttggtcccatcaaagataacatgtagacattcattcatgcgttcattcctttaactagcatttattgggttcctactatgttcccagcattgttattggtactggtgaccctagtataaaagacacaatccctgctgtcaagaggtcacagttctggaaggaacccagcggtactggcagcagcgctagtggggaatgggagcacatagaagaggcatttgactcagctttggaaagaattggaaaaggctttaaagtagagtaaaagtttgccagaaagaataatcattattacagcttttttaaagcgtcttctacatgccaagcactgtgctaaaatctccctatatatattgttttattttaatcctcacaactctaagaggtcactactgtaattattccaacttcacaaatgaagaaagtgagatttagcaaggtcgccttggtggggcatggctgctcacacctataatcccaggatttgggaagccgaggcaggaggatcacttgagtttaggggtttgaggccagcttgggcaacatagtgagtcctctgtctctacaaaaagaaaaaaaaatagctggatatggtagcatgcacttgtggacctagctacttgggaggctgaggtgggaggatggcttgagcccgggaggttgaggctgcagtgagctgtgatcatgccattacactctagtctgggtgacagagcgagaccctgtctcaaataaataaataaataggctgggcacgtgactcaggcctgtaatcccagcactttgggaggccaaggcaggtgtatcgcttgaggtcaggcattcaagaccatcctgaccaaaatggtgaaaccccatctctactaaaaatacaaaaattagctgggcatggtggcacatgcctgtagtcccagatactcaggaggctgaagaaggagagtcacttgaacccaggaggcagaggttgcactaagccaagctcgcatcactgcactccagcctgggtgacagagtgacacactgtctcaaaaaaatactaataataaataaataaataaataaagtcaacctgctcacctcttcactaagaatgaatagcagaaatgagaaatagatgcagcttttcctgactgtgtagcccattctcttacccaaggctgctatttacagtcgtgcaggttgtacattgcacaattccaatgctggccctgcactcaataagccattatagatgggaagggtatccaggcagaaggggcctactttgcagaaatatgaaaaagcaacctatattcagggaactgaccccatacagccatgtcagaggctacagaactccttgaagatgggcagctcctctgcacctccagtgattgtttacagaactgaccgatagtgtcttgggagagctcctggggttttgcatttgttttttgtttgtttgtgtttgttttgcttttgagacagggtcttgctctgtcacccaggctagagggcagtggtgcaatgacggctcactgcaaccttggcctcccaggctcaagctattctcccacctcagcctccagagtaactgggactacaggcatgtaccaccacactcagctaatttttatttttatttttgtagaaatggggggggggtctcactatgttgcccaggctagtctgtaactcctggctttaagcgaccctgctgtcatggcctcccaaagtgctgggattacaggcatagccaccgtgccaggccaggctttgcatttggtgtagagacccaatccttccttcttacagagctatggagctctcagcaggatgtgcatacttctgaactgttgaccatgcaaacattcaagcacagaggatgcaggaggtcctgagtctccaaactgctcagtgtcctatgaatggccaatcagtttctcatgcataggcaccaaacataacctgccaaacaagccagttcaatatctaagccaccccaacttctttgcagaagtcgtttcagtagcaaagaatggtctgagaaaaataggcacaaccagggtgaatgcctacaacactccaggtgctcagcaaacgtgatctcttccactctcacagctttatgagacatcatctttcattttgctgatgaggaaactgaggttcagggatcaggtaacttacctaggttacgtgtgcaacaagcagccacgattctcaccagaatctttctagtggcacagcctctatgcttctatcctaatgttggctttcaaaaggtacccggaaaagggcaggaaacagcttacatggctcctaaaatgcctgacagcatgtatgtggcagagtctctctctacttttttttttttttttttttgagacggagtctcactctgtcgcccaggctggagtgcagtggcacaatcttggctcactgcacattccacctcccgggttcatgccattctcctgcctcagcctcccgagtagctgggactacaggcatccgccaccacgcccagctaattttttgtatttttaggagagacggggtttcaccgtgttagccaggatggtctcaatctcctgacctcgtgatctgcccgcctcggcctcctaaagtgctgggattataggcgtgagccaccgcacccagccctctactaaggtacccagaaaagggcaggaaacagcttatatggttcctaaagtgcctgagagcatgtatgtggcagaatctctctctatttttaattttatgtatttttctagaacctatgtcatcaatctcagagctcagagacccctcctcaggtggagaggctgcttccagacatcattccaccacagccttttctcactgtgcaatagtttggtgttgacagagtagaataaattattaaatgcttttctggaattgatttgactccaagggtctttgtgttaaaataatttcctatatcaaatagggttcttggttgtgcctgactctgactaacttaaggggggtagggagtggaacttattggaaagatacagagcgagaaagagtctttttaaaaaaatgctgtaataatagggacgagaaccagggtagctctggggaaggaagtcacagaagttaaaggttggttcttcaggatgtcattatcaggatgtttcagctctgactcctttctgcccttattcacacacccagctagagttcgagttacccgccataccatggcacacagagaacaagacatcatgcctgacaattcccctaaagcttcaagcaaaaagtaaggggcaatctctaaagcaaaatcaaggtaatgctacatggagaaagggaaatagatctggcactctgacagcatttgtttttgcttgaccaggttctactgaggcaggtaatacaagctgggcatgtgaataagggcagaaaaaagcaggagctgatataacctgagagcagtctttctccaagaatgttcaactaaattatttcttttctttcttcttcttcttctttttttttttgtttttgagacagagtcttgctctgtcacccaggctggattgtaatggcatgatcttagctcactgcaacctctgcctcccaggttcaagcaattctcctgcctcagcctctcaagtagctgggattacaggcatgtgccaccacatccacctaagttttgtattttagtagtgacggggttttactatgttggccaggctagtctcgaactcctggcctgaagtgatccacccatctcagcctcccaaagtgctggaattataggcatgagccaccaagccaggcccaggctaaattatttcaatttaatgtactggaggtttgaaaattaatacttaaaaagaaacttgtctaatgtttcagagtttcagtttggaacgataaaaacgttctggagatggatggtggtgatggttacacaacaatgtgagtgtacttaatgtcactgaaccacacatttaaaaatggttaatatggtaaattttatgttatgtatattttaccacaatttgaaaaatcacaacaaccttaagaaagagagaaagttactaaatgatatgtggtatcctggaaaagaatacaatctatagtttagttaatatcattgtaccaatgttaatgtcttaattttgataaatgtgtcatagctatataagatttttaacattagggcaaactgggttcaaagtataagggggtcaggcatggtggctcatgcctgtaatctcagcactttgggaggctgaggtgggcagatcatttgagatcaggagttcgagaccagcctggccaacatggtgaagccccgtttctactaaaaattcaaaaattagctgggcatggtggtacacgcctgtaatcccagctactcggaggctgaggcaggaggatcacttgaacctggaaggcagaggttgcagtgagcagagattgtgccaccagactccagcctgaggaacacagcaagactctgtctcagaaaaaagaaaaaaaagaaaacaaaaaaaggctgggcatggtggctcatgcctgtaatcccagcactttgggaggccaaggtggatggattgcttgaggtcaggagttcaaaaccagcctggggaacatggtaaaaccccatctctgctaaaatacaaaaattagctgtgtgcagtggtacgtgcctgtaatcccagctactcaggaggctgaggcaggagaatcacttgaacccaggaggcagaagttgcagtgagcagagattgcgccattgcaccatcctgggcaacagagtgagactcctcctcaaaaaaaaaaaaaaaaaagaaagaaaagaaaagaaaagtaaaagaaagaaaacagtatatggggctgagtgtggtggctcatgcctgtaatcctagcattttgggaggccaagacaggaggatcgcttgaggccaggagtttgagagcagccagggcaacatagtgagatctcatctctacagaaaagtttaaaaatcggctgggcatgtggcgcttgcctgtagtcccagctactcactaggctgaggtgggagcatggcttgagcccaggagttcaaggttgcaatgagccacgatcgggccactgcactccagcttcacaactgaatgaatatatgggactctttactatcatgcaacttttctgttaatctaaaattatttcaaaataaaaagtttattttaataaggaaactacattataaacattttaataaataacttttataaatgacgttcaattcgtgagggttttcaacatgtaaactaattttgtggaagacgtccacattgttccataaaatgaataagaaatgttcttaccagccgggcgccgtggctcacgcctgtgatcccaacactttgggaggccgaggtgggtggatcacgaggtcaagagatggagaccatcctggccaacatggtgaaacctcttctctactaaaaatacaaaaattagctgagcatggtggccgtgcctgtagtcccagctactggggaggctgaggcaggggaattgcttgaacccaggagacagaggttgcagtgagccgagatcgtgccactgcactccagcctggcaacggagcgagactccgtctcaaaaacaaaaacaaacaaaacgaaacaaaacaaaatgttcttacctattagaaattccacagtatgatgatgttctcatctgagtcttcagttccctctgccttgatagtacagtcaatagaatgttccttctcagaatccaagccacatagactcagaactgatggaattaaaactgtacaaatccaggacaatcacacaccacatacctctccaggtgatgcaacacgaggcacaccatgtcacttctaaggtaatcatccccaaaatgtttaacttgaatcttattaaggctttaggttccattttggggggaatacaggagatcaacgaagaagttttgtgacaccatgaggagagaagtctgcaagctcagagtctggggcagaccggaagacaactggtgtggtctctggaaacaagtctaagttgtattctttagagaagtttggccatgaagggagcagaaaaatgaggaagtaggagctaagaggagtcatgggtgggcttttttctgttcttaatttccagtctttcatcagcaggggatcagtaagatcctgagcctgagccaggcatggatgagggaaatgtccctgtcttctttccctgttcttgttctgtgtcatttgttgcttcttctgtgcattatatggtcatgttcgatattagaacatttccttcttatatcaggggttctaatttaatctgcagagcattttgtccggctggctgtgtgctccataaatactgaataaaagaatcgaaaaagtcaaagttgtgaatgaagtggagatgaacggagcattaagagtcaggctggcactactaaggtgaggtgagtgaggcacttaagtgcaaaatttaagagaatgcccaaaaactcattgatcaagagcaatacaattttaatgcaatattttcaaaatcaaaattaatataaaaacccatggtgaacaaaatatcagaagtttaaagagcctacatttgtacaaccctgcctcattcatctcatgctaatcccagccccgtaaaacttttcctgcaaaaacatgcagctggcctacaggcataggtagctcatttgactttttgaaatattgcattacaatattattactcttgattactgagttttctggggcctttttaactcatctcatcctagccctgacattgcttaagttctgtatatgactcaaagaaacaatagccataaaagacattttggggataaaaggaagaaatggtataagacaacattggggaatactgttaacatttaggtgataatgacattgtgattgtgtagaagacgtccttgcttttttggagatgatgtcagcaaaacttatagatgatatgtaaatgaaacaaactggctgggggtgatggctcccgcctgtaatcccagcaatttgggaggctgaggtgggtggatcacttgaggccatgagttcgagaacagcctggccaacatggagaaaccctgtttgcactaaaaaaaaaaaatacaaaaattagcccggcatgatggcgcacacctgtaatcccagctactcgggaggtttgaggcatgagaattgctttaacccaggaggcagaggttgcagtgagccgagattgtgccactgcagttcagcctgggtgaaaatgtgactttgtctcaaaaggaaacaaacaggtaaaattttaataattgaattttgttcctgggtacatataggtattcattgcactattctttctaagtttccaggtgtttaacattttttatgataaaacatttttagacacttatataagccaaacttttataacaatgtaatagactgcagaccatctagaagaggctaattcattactacatagctgggtggtgaggatggaggtaactcacttgccctaaaactaaccctaacccagtcctcctccttccaatgcctgctgcctcacatgtagcctgtctttgttccaggcccaggaggagctgggggtaagagcacaatcaagtttcagtttagctactcagaatccagattaatgaatatcatttcaggcagttccgctttgtctgtccttttcctggtatctccccagagatgtccaatgtaagacaggccagcctcatatcagacatagagaaaaggcaaatgtgaacttttttattacacagaacagacagactgtcacaaatgggcctcaggtgacacagtagcatgacctgagtacttgctgcaactcctggggcctcatctcagacctactgaatctgaaactcagcgtgtggcccagcaatctgtgtttaacaagtcctgtaggagattctgatgcacaccaaagtctgaaaaccacagatgcaaagagacacacaagtgcatatgaataggcttgtttcatttggtccttccattttatcagtatgtagcctgtgtttcattatacctgtggtggatgtgttaaaaagagttctacaatgacactctcgtgcataattctcagagagagcttccattagtgtgctcaggaacctgcaggaaagcgtttcacaaaagtgccagtgtcactttaaggagccactctgactagagatgaacccaaggatcacgggctgttgccaaatctgtggtgtcttctgaccttgcttgtctttttgagcttggtcatgttttgcacggagccatggaggcccgtatagtctaggtgtcttacaggcattttcaagtttttacgaggcctcaaactatataaaatatatataaaatattttgaagcctcagaaaaacttgaaaatgcctgtaagacacctacactacaggtctccatggctctctgcaactattttatagttgctttaatttataaaagcttcccagctgatgtttatatgcagcctggattgagaatcactgctctagtgtctctgacaagtgaatatctttgataaaagagtaaagaaatctttgtttctttctgtttcatacacacacaaacacacacacatttgataggtatatatatagaagaaacagaaacaaagagagctcattgaggacattaggagcaggcttttggatggggtggtgtgcttcatccagtggcgcccccagttgggccctgcttctacttgcagctccacacactgcacagggaggcctacagcagccactggctcccctccatcccctagaccacagcagcctccatctggcctcaaaacatggagctgttgctgcccccagccacagctggcccagctgcattcacgttacccatttggccttcacaagatttaggcagaagataaacacagatggggcaggtgagcagcaggaaggccaggtgcgctgaaattccatcgaggcaggaagtgcaagtgctgcactatttgaagacactttatctaaaaacaatcaaaaagcaattcttctcactggatctggacccccctcaggtggagatggttctccccaactgggagcctgggcgttttcatgagtgggccactttcatcaggtgcaggaggctgcaggctcctcagagggtgcatcttcaaggggggggtcagaaaatgccaccttctaaaataaaaatgaaaatgaatcatgtgcataaactatgctaaatgatgacttggaatcgtgcttctggggtttctctaatatcagtaaggggactagaacgtgacataaattgtgtttcagggattgttgtaggcctgagttaatgcatccctgttgtgatggacatttgtcaatgtttgtggcagcctagcatccatgccctccctctatttgggggaaattcccactctgtcagtcacagcaagctacccctccctctagggaagtaggaaggtctagagactaacctcttccccagcacgcttttagttagcacagaggccaatgacaggctggccaatcagatgctctcaccctagactttatattgtgaataaaagtgtggtgtgaggcaaagatgaatggaaagctagaatccatgtgcattggctgggtgtggtggctcacgcctgtaatcccagcactctgggaggccgaggctggcagatcacctgaggtcaggagttcgagaccatcccggccaacaaggtgaaaccctgtctctactaaaaatacaaaaattaactgggcatggtggcatgagcctgtaatcccagctacccaggaggctgaggcaggagaatctctggaacccaggaggcagaggctacagtgagctgagattgcgccactgcaccccagcctgggtgacagggcaagactccatctcaaaaaaaaaaaaaaaagaatccatgtgcattggaaggatctggccaaggcatgctggtaggttttttcctgctcaaagatgattatcttgtattctgctccttgggcccctgtctctattggtttttggcccatatagttctctctctctctctctctctctctctctctctctctctctttctctctctgtgtgtgtgtgtttgatggcaaatttcaaatatacagtacattattatcaatcatagtccccatactgtacagcttatccctatcgtcattcttcaccttctaataatgtttgttgcttcttacatattttgaagcctcatagaaacttgaaactatttaattcaaagtggcctcttagtctcttttctgcttacgataatcggagtggttttctgctgcttgcaaccaacaattgactatatagacatgtttgggaggcataatataatgctgattttttaggtgttgtagggataccaagatgaatgcagtctggaatgcactacacacagcgcatgagaatacgggctccgtagtgagacaggcttcagttcacctcttgcctctgccacttactagctgggtgacctttcacctggtcttttatcattgctgggtttcatttcctcgtctgtaaaatggagttactaaatggtcttgaactcctgacctcaggtgatccacccgcctcagcctcccaaagtgctgggattacaggcgtgagccaccgctcctggccttgataatgattcttaacttcaaggaatttataatcttgtaggtctggctcatattcactagttcttttcaaacttccatggtagagattcaaggacaactgatgctgtaacaaaaggcaatcactaattggggtctagaaatggagagccaaagcataaggccacgtgtcagtcattcaacaaataagacccacagatatgtattcagatgcttattgagctcctattatatgccatgaccttactaaggatgatttcagtggtctctaatggtgaaaagaaagctgtatgtagaagaaatatgcactaaaagaaaacaaggttaattttccagcctaaaagaagtgaattcctctcaaaaccaagctctttcttttgtcatcaaatgggcttctgaatactcactaatttactttcccagggacctcacagtcaggaagtagacatcctctaagtgtagttattaggaatcctgttccaggtgctggccttccatgaaaaattaagtttctaaacttgcaaagataaagaccagatccaacactgacggttgacctcaccaagaagcagaaaacctgtgaaacctatcctgcccagatacaccatatactcaaatactttttgagctcatcttgtgtgtctggcgtcaggctaagcacagggaatatcacagtgaatcaactaggatggcccctgctgtcttggtgcttactctgtgttgaggaagggagatgcttaccaaataattacacagtcggctgggcatggtggctcacacctgtaatcccagcactttgggaggcctaggtgggcagatcacgaggtcaggagattgagatcatcctggccaacatggtggaaccttgtctctactaataaaaatacaaaaattagctgggcatggtggtgcatgcctgtaatcccagctactcaggaggctgaggcagaagaatagcttgaaccagggagccggaggttgctgtgagctgagattttgccactgcactccagtctggcaacagagcaagactacgtgtcaaaaaaaaagaattacatagtcatgtaatgacaaactgtcttaagtaccctgcaggagatgtttagggatttatgagatcatgtaatagggaacactgatctagtctagagagttagggagggttttgatgagtaggagcatacctgagctttggtcttaatgatgagtagtggttgactatgtggagaggggaggaaggaataggtaagccagagaaaacatagataaaggccctctggtgagagagagcaaggcctgggtacccaccttctaaagtgttgtgggaaacatatgcagcattacctgcaatacacaataaatgttagtggatggaacaaataataagctaataaaaactaactttttcttaggcttattatattctaagaacttttaaaatgtattaggttaattaacactagctactgtagcaaagaatccccaaatctgtgtggcttaatgcaataaggattcatttctccctcacctcacagtgaatgtgagttgggcagccctctcgggcaatctccttctagctgtgactcagggatccacgcactttctatcttgtagctccataacccccctccagagccttcttgaagttctctcctagatcttttctatgtgattgcccaactagtgtggaagatagtgtgggacactttgggaacaggcttgtaagtgacatacatcacatctacccctgtcaaatggccagaaccacgtcaacctggtcctaatgtgattgccgcagaggccatgaaaggtagctgtcctgtgtgtggcatgactccagaacaaggtctcttaaccatacccaatatttgccaagaaatctgtatcaggaatcagacttaagtgcttatatgacaagctgctattctggatgaaacacaaacagaattagatagaaatggtcaccagttttgggagcttacacccaaagagccagctctggccaggaaactcgacaatttagagcacattctgttgaagatcattaaacccaggcggtgattggcaactgcctgggagtggagagggggccaagggagagatttcacatttctcagggtgcttgtgtagtctggataggcatattctaagatgaccattgttttaatatgtttttagtcatatcacatttattttgaagttttgaataaaattggggtgagggatggaaggaaatatttatattttcaaaggagattccaagaaggttgagaaactacagaccaggaaagggaagggaattatttaccaggggctgaacttatatgtgttgggggaaaagaaaggaatcataaaggtatgatttcttctctttctccttccccgagcctgaacacatttcacattttctaaacttgatgggaatttcctcttcaatctctggccttggagagagaaaattggggaaagagaagaccaggaatgaaaaattggagagaaagaatgaaggaaactcttgaataaaagaaagttgcttagaacataggggaggagaagatatcatcaaaagccaaactccagacttaagtttaagtgttagaaaatgttcctgaaaggtggccgggtgcggtggctcatgcctgtaatcccagcactctgggaggccgaggtgggtggatcatgaggtcaggagatcgagaccatcctggccaacacagtgaaaccctgtctctactaaaaaatacaaaaaattagccgggcgtagtggtgggcacctgtagtcccagctacttgggaggctgaggcaggagaatggcgtgaacctgggaggtggagcttgcagtgagctgagatcgcgccactgcactccagcctgggcgacaaagagagactccatcccccacccccaaaaaaaacaaaaaagtgttcctggaaggttggaaagcccaaataagtacaaaaaagattccaaaactgagtttcaaagaagggaggggtagcctggtggtttgaggtggcttctgattgtgacatgactctggatagggcttagagatttggaatggtgagagtaaacagtgattaacaaaaagtaggtaaggcttagtgagggttcccactcacataatttgccatgtgaatttcatctgctattgtcacaacattcccatggaacatgcacccctgtcggtcccatctgccaaaaatcacactgttagtaagtggccaagctgggatttgagcggtccttctggttccagagtccaagctagagttagatgtgcctgagctgtataatggcttaattaattgttggtgtttatgaagtggaaatacacatagtacaatcagttaattagttttcttcacagcctgaacattaaatattttcccctttacctttgctctggtctcccacttggagagagaatctttgcattctttttctttgagaaggagtctcgctctgtcgcctggctggagtgcagtggcacaatttcggctcactgcaacctccgcctcctgggttcaagtgattctcctgcctccaagcgattctcctgcctcagcctcctgagtaactgggactacaggcacgcaccaccacacccggctaatttttttttttttttttttgtactttagtagagacggggtttcaccatgttggccaggatggtttctatctcctgacctcgtgatccaccctcctcagcctcccaaagtgctgggattacaggtgtgagccaccacgcccggcccaacctttgcattcttaaggataatctgattgtttccacttggacagcttggcgaggaggagtgctaactcctagaaagctcctaattactgccaaggtgagcgaagtgaaaagttggttccattttctgcagaaagggtcagttcatttaattccagcaaaaaactggcttccaggagaaaaaggactgtttaaaggtctgtgtcaattatatggtgattatgaaattcatgctatgactaatccagtggctcaatctatgattatctgacacgatccaagaatccacagtgtaacaggctctatgactccattaaagaaaagtcagtttaattctgtgctatgctccagattacttctctcctttcctagatctcctctatcaaagagagtagacgtttataaaatggtgtctgaattcaactcagtgtcctggaagccatatgaaatatttttttcatggatgactcagagcttgggaattccagtgtgttgctttatataatctgaagtaccataaagacctttgacctagaagacttcctttgttgcatgtgtatcttttcctgtaattagagtctatgattagactacaggccatcatgacaagcctttgctttccaaagcactctatttttggaccttctaatttgatttcttaggaatactatattttgtaaatattaaccaaaatccatttttaacaagcacctacaagcatcccagtttcaaaaatcaggaagcaaaaaattttgcccaaactctgtggtcactgacagtgttttggagaagagtctaacaatctctgaattgttgcaacttcccagcgcctttcagagacaaaggcccgtggttcctgtacacattttgtgtcttgtggcccagctttcctggctgaagctgagtggaccaaggattagtgactgatgaaaaagctgccatctgtaggttagacagcagccatgagatgtcctcgtaaaagagccaggcagaaaaggggcgccctctacaggatgggctctggctgactcagtttgactgctagaaatactagaatcatcagtcagacagagaggaagtaaagacagtcacaataaaggtagaagtctagagtctgcagcaaaaggcacctgtgctgagaggacagcaagataaccagatatttgccttgtatctcaaatgcctgttggttttattgatctcctcatcatttctctatgtaacctctgagtcctcattgattgacaaagctagaacttgctttcctgaaacctgtagtaggctgagtaatccctaatccccagaatctgtgaatatcaccttatatgacaaagggactttgaaaatgtgatttatatgaaggatcttgagatggagagacaaccctggattatccaggtggggccaatgtaatcacaagggtccttataagagggggcaggagggtcagagtgatgagtaggagatgtgctcacggaaacaggagcttggagtgatgtgaggcaggggctgtgaggcaaggactgcaggcagcctgcaaaactgagaaaggtaaggaaatgtattcccttctgaagcctccagaatgagccatttctgcaaacacttggctaaatctcagtgaaactgatgttggacttctgacctccggaactataagatatacatttgtgttgttttaagccactaaatttgtggcattttgttatagcagccataggaaactagtataccaactgacagactaagccagaggtccagcattttctgtccttttttatggaggaagacagacaataagtaccttaagcacttgaccgttctgcctgttagcattgtgagaagttctctgatctgctttgaacaggttattacattttgccagaaagatataagggagaaaatgggaaactaggcattgaataaaaatgacaagagagtggccaatggggccacagtcgctcaaaaaacacaccgtaacggcagtccatggctgggtgccatagctgacacctgtaatcccaacacttcgggaggccaagacaggtggattgcttgaggccaggagttcaagacaagcctgggcaacatggtgaaaccccatctctactaagaatacaaaacattagccgggtgtggtgttgcacgcctgtggttccagctactgaggaggctgaggtgggagaatcgcttgaacctgggaggtggaggttgcagtgagctgagattgcaacattgcactccaacctgggagacagggtgagaccctgtctcaaaaaaaagagcagtctttctaaggagaaagaatttgatgttatatttttaaaactactaatgacaatgaaaacagataagaacactggtaaaactgaaaccacacttcacccagggctgtacccatcacacagtaatttttcattaattcaaaatctgtctggagagatatcccaatgctcttgttaattacttctttcaaggcattcttctcattgtaattgagcactcccctgggtaccatcctataagtaagtacattagtgcctatatacaacctaccgagccaagtacttatacacacaaactggctttctggctcacctttcaactctcccattataatttctagagaacactgccaggtaggcttgcctgtcatcctcaataaagacccaagtgaggattcttttccgtaaagcttcaagtttaattagctcattctgctagttccttagaaaaggctttctgctgccaaagaaaattaagctttttttaaaaaacaaaaacaaaaacaaaacaggtttcaactcattcggtatattttaggataaatatattttgaaggcaagggcaaagtttttttgtttttggttctgtttttggttttgtttttgagtcggagtctcactctatcacccaggctggagtgcagtggtgtgatcttagctcactgcaacctccgactcccgggttcaagctattttcctgcctcagcctccagagtagctgggactacaggcacgcaccaccacgcccggctaatttttgtatttttagtagagacagggtttcaccatattggtcgggctagtcttgaactcctgacctcgtgatccgcccacctcagccacccaaagtgctgagattacaagcatgagccactgcgcctggccaagggaaaggtttttatacatatttttatttatcccttagtaacctgaatatgactaataaagaaatcttgaccagtgcagtggctcacacctgtcatctcaacactttgggaggccgaggtgggcggatcacgaggtcaggagtccacaaccagcctgggcaacatggtgaaaccccgtctgtactaaaatacaaaaaattagccgggcatggtggtgtgcccctgtagtcccggctactcgggaggctgaggaaggagaattgcttgaacccaggaagcagagattgcagtgagctaagatcacaccactgcactccagcctgggtgacagagcaagattctgtctcaaaaaaaaaaaaaaaagaaatctttatactatagtaataaggattattctgatagttactgtattgattgttttgataattactgtgttcttagttgcagacaacagaattcactctagctagtttcaatagaaaggggttacagcagggtattaggtagcttatgggatttccagcagtgccagagaaacaggtgaggataccacacagccggaaacaaccccagcagaaatgcccagccataaacagggctgttctcacagaagccccactgctgctgctcaccattcaatacctgtgatgctgggggctggacagtgaggcttctctcaaggctctttcacggtcatgtctgcaaaaagatggacccaactacatgtgctgccacttcacttaaatgaccttcatcttcctggagcacataggcatctgctgggcagaacctgggtcataggcagaaccctagctacaaaagagtccagacactgtaggttttagaaatggtcaaagcagatattgtgtggacccattcgtggaatctgccacagtgaccatatcgatttcaggcaatttgtaagtaatggtaatcatgagagttatatgagaataatggctagcaatttccagtgctttgtagcacttaatatcttataagcatgatttcatttaatcctcaaagcagccctatgaggtaggtactattcgtatccttggattgtaagtgaagacatcaaaggactagagaggttaattcactcaccccacatctcatggtggtaaaaagccaggattcaaactcagctctgtctgaatgaaagtctgtgctttcagctagtatactgctaatgctttactaattattatttttagtttatcttctaggagcagcttgactatctaatctgggtttaccacttctggaagactttttacccacagtgggactctgatatttgtgtaactggaaatggaaatgagatcttctgaatgtggaatgcaaaggagagggtacgtctcaccaatcctgggttatattacctttgtgtcagatgtaaggtgacaagccaagcataggacatgcaccaagtggaaaagtccactgaaaattttatctttgaagagaacagaaaaagcattaaatctctatatctggtacagtctatatgggttgttttatctgaaaggggaaggaggaatgctttaaaaaaaaaggtaaccttaactctaggcaaaacttaaattattttcttctctttcttcatttctaaagctacagccagtcagacaagatgggacatgtagtgttgcacaatgatcctgctgcattttcagcctccaggctgagaagcaagtgcaattaacattccaaggtgggagttatttccccaccatttgagccctgcagcatcttattgtgattacaaaggctggactaactggctttgtcaatgtaatgtatacacattaaacatatacagacagttcttgaaaagttataaattcaaacattccatagtatgtggaacccagtaaattatagaatgggaaatgctttcaaaggagcacctgattcagcatcctcctacctcttgtttctaattaaaacaaaaaaaaaaagaaaaagaaaaaagaaacataaaaacaacggcattgtagtcatgctttaatttcattctaaacttgtgtcatcctgttgaattgaggcccacagggaacagggcccagcaaatccctggacctcctggtatttggtataaacatagcagctaacctggactggcttccacagagctaagacattttcttttttgcacacagagcagtatgctccaaaattatatgtacatgttgcaaaagtatatattttgttccaaatatatgctctaaaattatatataatatatatatattttatatatatataatttctttgagtcagggtcttgctctgttgcccaggctggagttcagtggtgtgatcataacttacctcagccttgaactcctgggatcaagcaactctcctgcctcagccacttgagtagcttgggctacaggtgagtgcccccatgtccagctaatttttatgttttgtagagatggggtcttgctttgttgcaaggtatctaactcctgggctcaagtgatcctcacgccttggcctcccacagtgctgggattacaggtgtgagccaatgcacctggccatgaacacatagttttaaaaatacttatttgtttaaatgtatattaagaaagacatataataggtcaaacatgagattcgtggatgttattgctcatagcaaggctaagattttaaaaaagaagggggaatcactgaaaggaattagataaataaataacatgatactctagcaaaaccaaaaacgttgcaggtggtcctggagtgatgaaagtgagggaagccatcgaagagaacagtgcctggattcaagtgcctgctctgtccctgacaggctggaaagatcttgaacaagtcgtctccccctgatgaacttcagactgtaaactaagaggatgtactggggcaatgttgaacgtggggtgtgttcttccttgttccaggagaccagggcttcccatggtgtctcaggcactgggcaggaagaaaggtgaggcttccactcccaacagcttcaactagaggcagctttcactagctttacaaatgcagcttcttacagaagttggtttgaaaataaggtttcattggttaaaaagtctgaaaatgttcttctcagccccaaaatagaatatttatatactacgcttttgtaaacgataactaaccaaaaagctaatgatatcaaaataagttcagctggcgtgcggcttgtttcaggaagtctgttcaagaggaaagtatagccaaataataacagataatgtgtttgatcacaggctatcccaggcactgagctatatatactaatgaatcttggaaaaacaaaaccaataaacaaaataaaaccaccactaggaggtacgttttataaataactccactttacagatgaggatactgaggctcagagaagtgaagtggcttggcttagctcacccactttgtgcacagtcagggtacaaacacaggcagtctgactccccttaactgtatcactgtgtcgcctcgcaggagggcagagagaggtgcctggtacctgggaatcggcgatctctagcaatacagataaataccccatttagtgcacatttcaggctacccagcatccatgacccaattttcaaagattttccattcatctagttgttaggcagtggtggtccgggcatgcttctttggccaggccagggatgatttctgtttcatggtacagtctttgctgtgagggttcatctgggtgggggctcacaggcctcttacaatggagtttctcatattctgaaccaattctgggttctcaggcaggtccctgagtcatattcttttttctcctggatcacagggctgggtctacctactttctttctttcttttttttttttttttgatactgattctcgctctgtcaacaggctggagtgcagtggcacaatctgggcaaactgcaacctccgtctcctgggttgaagcaattctcctgcctcagcctccagagtagctggaattataggcatgcgccaccacgcctggctaatttttgtatttttaatagagacggggtttcaccatgttggccaggctggtcttgaactcctgacctcaagtgatccacctgcctcagcctcccaaagtgctgggattacagacatgagccactgtgcctggccagaagtcttcattctttacagtacttcaggacttccaaatgcctcttcactctctcctcatggtttgcattcctgcactggtgactctctcttcattgcagtgccttctgcatatcccacacggcaggaggcccagacaggaacccccacggtgtaaaaggataatgtttgatctaagcgttctgtccaaatccctccagatcttttttttttttttttttttaatcaggcagccctcagaatcacagcagattcagagagagtgcccctctagatttttttatgattttggtcatttctctctgccttcaagtgtgcttttgtttacaatggcctgcacctgtaactcttcttaggggaatttgccctgggctactggagctgcttttcactcaaggacagaattctggaagtgtctagtaggttttcatgctcctggtgtggcccttagtggatgaccaagggtgagaccctctcttgccttaggctgagacagactcaggtgtgacttacatcccagagtgtttcccacccaccccctccctgcaggatcaggctgaatcacagactggctgggctccttcccttgcctgcctcctccacgccttcactgatttctcctgggagccattttttaaatttattacttacacacaggtcctcatctcagggttttgttctgggaaacccaacctagaaaaagacttaaaagaaaaaaaaagaattacaacttaaaactgaaaatagttatcactggttttaatgcagtataataaagccaggcctgttccttctcagcctcttgaagaacttaatgctcaatttaacattttatttacattttcattcatctttttatgaattaatcacgcccaaacttttgttgctctttccttcctttgaaaggtttctgagtttcttcccttctctggaagttaactggtgaggactgccttaaacacagtttaaggagttgtgttgcccccaaccccaatatcccctttcaggaagtagtgtcttggttgtgttttgtcttccaacacacagatgcatacacacacatgcacccacaaatacacacttgtgcacacaccaatgcacacaaatcatgttcccacatgcaggcatgaataaaaacatgcactcacacacgtgtgcacacagaaatcacgtacatgcacacatgcacacacatatgcacaccatagttaggattcaggcacctgcctatctgcctgcctaaactgttcactgtggaatttcctgatgcttctttttacttgtgtggtttcctgaaagagtatgaaggactctgatggttgtcaacagagtgtcaagtgtaggactgaaccaaatgacatactgttgaatataataagaaaaatagaaggcactgagagaaaaagaaggcgagtagtaaaatttctttgggtagcttctaagcacacatttttaaagttttgctaaagtctaagggggcatacaaaattaccttagattaaatgtttattatagcttccgtattaatgttaggtcagatttataatgtggtagactctgaatagaactatgtttatactatgttgtatatacacttttattattattattattattattattattattatttgagaccgagtctcattctgttacccaggctggggtgcagtggcatgatcttggctcactgcaacctctacttcctgagttctagtgattcttgtgcctcagcctcccaagtagctgggattacaggcatgtgccaccacacctggctaatttttgtatttttagtagaaatgggatttcactatgttgcccaggctggtttcgaactcctggactcaagtgagtcgcctgcctcagcctcccaaagtgctgggattataggagtgagccaccatgcctggcctgcattgtaattttccaaaaggaggatggagtcatgcttgccaaacctattggactacagcacccttcctgaggagcatctctggaaagagagtccagtggacaatactctcagcagtgctgacccgctttacccttggacctgcacgcttgcagtgatctggtctagctttttgttacatgaacaccagcattttccacagatgtgacctcccactgtcaaggtgatttaaaacaaaattttttgtagaaaccaaaagaatccttgccagataatttaagcatcaaagagataaatgcacatgtgatgttatagaaggaaaagaatcttcttgggaggtgctacttctcccctagcccatgaggaccaataaatactaatgaggacccttctcatctataagccagggtgctaagcaccctccacagactatctgatttacttattacagcactgccacgtggtagatggcatttttcttactttgtaataaaaaagcctgagggttagagaagttaaataactcacttgaggtgcccaacatcatctggtaggtctggattcaaatccaaacctgtaacaccaaagcccatggccttaagcaataaaaggtaaaaggctggcatggtggctcacccctgtaatcccagcactttggcaggctggggcaagtggatcacctgaggtcaggagtttgagaccagcctgaccaacaaggagaaatcctgtctctactaaaaaatacagaagtagctgggcatggtggcgcatgctggtagtcccagctactcgggaggttgaggcaggagaatcgcttgaacccaggaagtgatggttgcggtgagctgagatctcgccattgcactccagcctgggcaacaagagcaaaactccgtctcaaaaaaataaaaaaataaaaataaaaggtaaaaaaagcaaagaatgagggggagacatgtccaagtggacatctgtacatcccccttcccttgtgtggctctagctgcctggatttaaagtcaggtcagagcccacataccccaaggtatggggcccaaagtgaccatgctaatttctcaggccttaggtcaggtcactcaatgataatagctgatatttatggagtgcttccccagtgccaaccactggtaggatcttcacacgcgtgatctcacttaaacctttaggttcaaagctgtgaggtaggtactataatgaccccattttacagaaaagcataggttcagagaggttactttgcttgcccagggccacaccactaggaaacggtagagctgggcttcaaaaccaggtctggtctgagttcaggccatatacttaacccatacttaactctttgagttaaaactagaaaaaaaatggaaaaatcagtcttttttaggtatttccaaattatgaacatttgctggttttgggggctatgtaacacccagatcgccttcctgtttcatgggaattccacttttggaaggtcttgatgggagggcctctgcctgtgggagctggcaaaggccagacattccctgtccctgcctcctggctcaccagtgggctgctccagcagggaatgatggttttggggggcgtgatgatgccaagacacgggagcccttagagagcatccatagcagtggctgtggctgtgggtgatgttcctgtgtcacatctttggctgggttttctgctgactcaccttcatgagttcctgcctgtttcctggggctggtagccaagcctccccacctgttctgtgacccaccaacgtttttccaatatactcactccctttctgtttaggtaaactgcaggtggcttctgatgtgtgcaaccaagaaccagacatgtacaaaagtcttcgtacttttggaattatataattggagccaaagataaacctttgtcttaggctcctgcagatgatttaaaaatgtattcttttctgaaatccaagcagaggacatagctgtggctttgtccttgggtaacaaccaccttttgtacactggggctataggcagagaattccagtttctcagcgtgaccttcaaggctttgcccagaatagctccattcatgactctgtcttctaactaggcccgtattccagccaacctggccttctggctgctccttagccatgttttgccttttctcacccaaatattcacctgcccttctgagatcagcttcttctaacacaggtatacatggaaagcttggtcttacatataccttgagtcgtccgcttagaagcacgtcctatatgtaatcccagcactttgggaagtttggccagatggatcacttaaggctaggaatttgaaaccagcctggccaacatggtgaaaccccatctctactaaaaatacaaaaattagccaggcatggtggcatgtgcatgtaatctcggctacttgggaggctaaggcatgagaatcgcttgatcacaggaggcagaggttgcagtgagctgagatcgcaccattgcactccagcttgggcaaaagagcaagactccgcctcaaaaaaaaaaaaaaaaaaaaaagaagaaggtcctatagtcataggtttcccactgtttctagctctgctgagggccgcggctcccctacagtggtctgctaactccaactctaggcctgaggtagtccacttggtaggagaagagtctagttgtctcttcataggcctcactgggaagtgggaaagggagcgggtctccttccccttcaccacaccaccccaggttgtacagatggaacaactcacttcactgggcatgttggaaccattggaaagcgaaccgaaattcaatagaaggaaggtgaaagttcttgatgcatctgattctcccagagttgcaagggaaagtagcacaaaattaggccttcactttgttggggtagaggattctgctaaggtctggccctgaacgtcctactttcttgatcaagcatcttctactacaagacttttgggaaaacctctttgagtcactggaaaccactgggaaggctctgtcccatccccctcctctctccagacatttcctcattcaaatgggcaactcagcaggactatcagccctgctaggacaaggaagacctgaagacccatcagaggtagcaggagctggggagaggctcaggctcaccagggtctgtggctgaggatgggtatgggtcgtctgggtcagattatctttgtgcttgctattcccttcagcaaacatggctgtgtcagtagcttttgaacttgttagatttaacaagtagtggttaattaagaagcttttcttcattaacaaggtgcttcccctttcccttgaagtccctaaatcccgttataatgtacaggaggggttaatccctttctcattttgcctatcagagcaatggaggaggcgtgtggctcatgcctgtaatctcagcactttgggaggccgaggtaggaggctcattgagcccaggagttcgagaccagcctgggcagggcaacacaaaaaaaaatttaaaaattacttaggtgtggtggtgtgcacctgtagtcccagttgtttgggaggactagagggaggatcatttaagtgggaggattgtttaagcctgggagattgaggctgcagtgggcagtgatcatggcactgcactctaacctgggcaacagagcgagaccctgcttaaaaacaaagaaaaataataatgcaggagttactttaaaaaaaaaaagctttattcagatataattcaagtatgatgcaattcacccacttgaagcacacaatttgagggtttttactacagtatattcacagttacaggccatcaccacagtcaattttagaatactttcatcaacccaaaattaagcctcatacccattagcagtcttggcaaccactaatcaactttatgcctctatagatttgccttttatgaacaattcatataaatgaaattatacaatactgtatgtgctattctgtgactggcctccttcacttagcataatgctttcaaggttcatccatggtgtagcatgtatcagtactttattcttttttatagataagtagtgttcattgtatgaatataccacttttgtttatccatttatcagtttatagatctttgggttgttttgactttttggcgatcataaataaagctactaagaacatttgtgtacaagtctatgtgtgcacatatgtttcttcatttttcttgggtatatacctaggagtagaactgattgatcacagctctgtttaacctttggaggagctgccaaaatgttttccaaaatagctgcactatattacattcctaccagcgctgtatcaggatttcaatttctccacatccttgctacaacattatcatctgtgttttttattatagccatcctactaggcatgaagtggtacctcactgtggttttgatttgcattttctgatggctcgtaatgtcgagcatcttttcttgtgcttattggtcattagtgtatcttctttggagaaacgtatatctacatcctttgcctgtatttatttatttatttatttgagacagagtctctttctgttgcccaggctggagtgcagtggtgcgatctcggctcactgcaacctccacctcccgggttcaagtgattctcctgtctcagcctccctagtagctgggattacaggcgggtgccaccatgcttggctaatttttgtatttttagtaaagacagggtttcaccaagttggccaagctggtcttgaactcctgacctcagatgatccaccagcctcggcctcccaaagtgctgggattgcaggcatgagccaccacgcccagcctatttattcatttagagatggagtttcattctgtcacccaggctggagtgcagtggtgcaatcttggctcactgccgcctctgcctcacaactttcaagtgattctcctgatcagcctcctgagtagctgggaccacaggcacacgccaccgcatccagctaatttctgtatttttagtaaagaagggtttcgccatgttggccaggctgatctcaaactcctgacctcaggtgatctgcccgtctcggcctcccaaagtgctgggtttataggcatgaaccactgcaccaggccatttgcctgttttttaattgggttatttatttttattgttgtttttgagttgtaagagttatttatatagtctaaatacaagtcccttatcagatatatgatttgcaaatattttctcccattctttgagttgtcttttcactttctttatggtattctttgaagcatgaagttaaaaaaaaatgtgaagtccaatttacctttttttcctttaactgctttgctttagtatcatatctaagaaaccactgcctaacacaaagtcacaaagatttacttctttgttttatttgatgagttctagaattttagctcttatattcaggtctttgatccattttaatttttgtatatggtgtgagataggggtccaactttattactttgcatgtggctatctagttatcccagcagtatttgttggaaggactattctttccccgttgaattgtcttggtatccttgttgacaatcaattaactgtaactgtgaaggtttatttacagactctcaattttattctttttatttatttatgtatttattttttgagatggggtctcactgtctcacccaggctggagtgcagtgacgtgatctcggctcacagtaacctctgcctcctgggttcaagcaattctcctgcctcagcctcatgaatagctaggattacaggcacccaccaccacacccagctaatattttgtatttttagtacagatggagtttcgctatgtttgacaggctagtctccaactcctggcctcaagtgatctgcccgcctcagcctcccaaagtgctgggattacaggtgtgagccaccgtgcctagcctattctattgttttatatgctgtccttataccagtaccagaggttactttttttttttttttttttttttttgagatggagtctcactctgtcacccaggctggagtacagtggcacgatctctgctcactgcaagctctgcctcccagattcaagccattctcctgcctcagcctccccagtagctgggactacaggcacctaccaccatgcctggctaattttttgtatttttagtagagacagggttttaccgtgttacccaggatggtctcgatctcctgaccttgtgatccacccgcctcggcctcccaaagtgctaggattacaggcatgagccaccacgcccgccctgcctagaagttacattttaatcaaggctgctttctttccttccccaggaggagctcctggttgacagtttctttgttcataatttagtcttggaaggaggataaggtcagagagaaaggaggggaggtaggcagttctttatgtctgtattttctcaggctgttcttatttctccaagagtgggactccataccatagaggacatgttagtgacaccctcattcatttattcattttcagtgcatggtgatacactgcagcttgtctgtgcctaattaagtggttctatagattacactaactggattccaataaactaaatttgctgaccttttctgtgaaggccagaggctgtcagtagtatcaaaacatgcctgcattcatgtgcatacacacacaatgtgacctttaaaataaaggtgttatttaacaatgattgagagaaagacaaactcctttcctaaaaagacacgttaagcagagggcattaggaaaacagatctttaaaaatatttcatagttatgtggttttgttgtaaagacaagtatgtatttataaaaactcatagctgtggccaggcgcggtggcttatgcctgcaatcccagcactttgggaggccaaggcaggtggatcacgaggtcaggagatcgagaccatcctgactaacatgtgaaaccctgtctccactaaaaacacaaaaaaatttagctgggcgtggtggcgggtgcctgtagtcccagctactctggaggctgaggcaggagaatggcctgaacccggcaggtggagcttgcagtggccaagatcgtgccattgcattctggcctgggcgacacagtgagactccgtctcaaaacaaaacaaaacaaacaaacaaacaaaaaaaacgaaaacaaaaacaaaaaacctcatagctgcatacttttaaaacttggaaatcaaaatttctaacccatttaggattaaaaggaaatgtttcagtggattttgtactcatttgttagtttagaagaacaactggttcccatcagggaaaatggaaagacgctaacagcattacaagagcagcagcacctttgcataattagtgaacaggatggaacattaatatcataggccaggcacggggggctcacgcctgtaatcccagcactttgggaggccgaggcaagtggatcacctgaggtcaggagttcaagacaagcctggccaacatcatgaaaccccatgtctactaaaaatacaaaaaaattagcggggcgtgttggtgggcatctatataatcccagctacttgggaggctgaggcaggagaattgcttgaaccccaggggcagaggttgcagtgagctgagatcgtgccactgtactccagcctgggtgacagagagagactctgtctcaaaaaaaaaaaaaaagaaaaacattacatagtaagcagaactaatgacagcttcatccatttgtgtgtatgtactcttttagagcaaatgtataagttatgatatccatttaaaaaggaacaaaataagccgggtgtggtggctcacatctgtaatcccagcactttgggaggccaaggtgggtggatcacttgaaccccaggtgcagaggttgcagtgagttgagattgcaccactgcactccagcctgggcgacagagtgagactccatctcaaaaacaaacaaacaaagaaacaaaaaaactgaactttagaagcagaactttgaaaagaacaataaatcaatatgctgaaatcgaagggccgggcgcagtggctcatgcttgtaatcccagcagtttgggaggccgaggcgggtggatcacttgaggtcaggagtttgagaccagcctaaccaacatagtgaaacgctgtctctactaaaaatacaaaaatttagccaggcaagatggtaggtgcctataatcccagctactcaggaggctgaggcaggagaatcacttgaacctgggaggcagaggttgcagtgagctgagatcacgccactgcacttcagcctgggtgacagagcgagactccatctcaaaagaaaaaaaaaaattagtttggcattgtggtgggtgcctgtaacccagctatgagggaggctgaggcacgagaatcacttgaacccaagaggtggaggttgcagtgagctgagatcgcgccactgcactccagcctgggcgacagagcaagattctgtctcaaaaaaaaaaaaatgctgaaaaatgtaaaacaagtccaaccacaatgctcttactaaaaatattattataaacaatattaacattttatgtttataatatattaaatactattaatcatgttgcaaatattactaatgctggaagttttagtgagaacaaaaagtaatatattaaacagaataaaattaaaaatagttaaaaatatatagattctgtaagtcctatactgggcagaggtgcttacattcttttactgatatgaatatgccttcaaaaaattttttttaattttaaaaaaggaatataccatcaaaaaagtttggaggccactggcttaaactactacagtgttgtaatacagaacaacactgtgaactgccaatagggaactacagtgcatggcatttctcaaactcgtctggccatgagtcatttggaggcatgaaagttccaagaaaccctctttggaccatgctgtatggtggataagagcatgaacctggagtcagacaaagctgacttcagctaactaccagactcatcttatactagctaggcgacctgagcattttactaaatctttttgaacttttttccttatctgtgaaatggggatagtgatatctacctcatatggttgtatggactttaaaaacaatattgtatataagtgcatagtataatgcctgatgtcttgtaagcaccccttaaaaggaagtttctatcattctatcatctctgatagttatttagagacctgatgtatctttcataactacacttcttcagagcagaaattgaatcttctcttatgagtcccatggaacacttagctgcaataggtatgtgagaatgaagaaataaatgatattaatagaagcagagttctctgaaagactgagagactaactataccaccaaagacagaaatgtttctttctcagctgtttataacttaccattttaatggctacaccagaacattcacataggatgaatcctcatagtaattttccttacctaggcagttgataacaattagtctgttactaattgtttccagctgctcccctttgattaatcaatcaaaacaaatttataatggttctcctgtggtttgatactgctaggagcctagcatgcctgtgatgaagacaagatgactacgtgtgcttaaaagtccggggagtaggctaggcacgatggcttacgcctgtaatcccagcactttgggaggctgaggcgggcagatcacctgaggtcaggagttctagaccagcctggccaacatggtgaaaccctgtctctactacaaatacaaaaattagccaggcatggtggtggctgcatgtaatctcagctactcgagaggttgaggcaggaggactgcttgaacctggaaggtggaggttgcagtgagccaagatcatgccactgtaccgcagcctgggcaacacagcaaaactctgtctcaaaaaaaaaaaaaaaaaaaagtcaggggaataaggactggagtggccaaagcaagttcagcatcagaggattaggtgggctttaaaggagagacagtgactcaggcctataatcccagcactttgggaggctgaggtagatggatcacttgaggccaggagtttgagaccagcctggccaatatgacaaaactgcaactctactaaaaatacacggattaggtgggcatggtggtacatgcctgtaatcccagctacttgggaggctgaggcatgggaatcacctgaacccaggaggcagaggctgcagtaagctgagatcatgccactccagcttgggcaacagagcaagactctgccttgaaaaaaaaaaagagaaacaaaagaaaagttatttcagacccaggtaaaaagaacaaaggcatgatagtgtccatttctggctctgatttccttttgtgccccttcctctggaatgttcctcttacaaagttttgttatagtagtactaatgatactactaccacttatgacaattacataattagttacttaataaataatccaaataagtcctagacatcacttggcccagttttggagtagtataacattcagaggaagaacctagcaaccaaaaatgaagttaattcctatgtatattttcctaattacaacccacagtaacacttctgaaaatcacctctctttctatgcctttaggtctccattcagcagctgcttaaagcccctctttctttacttttctcagtatctgtgggggtcagttagggttacattcagctgcatggaactgaaacctggatgcacatacttcacaaaacagaggttttatttttctttctgtaaccagaactctggaggtaggcagttcagggcaggtacagctgcttgaagaagtatcagggacccaagcttcctttagcttccatcttttgcaaaatagctgcttcacttctaggctttgatctacgttctcagcaggaaaaagaataaagagtaaatgacaaaagatctgtgctgttgctggcaggttgggcatttggtggcatcagcagctggatcagccttgttgagtgggagccctgctactctgtatttgcatccttttctctgatgttcccccagggtatgccactttttaaaaatgtcgactgttggctgggtgagaggggtgcagttttagaagcttccccaggtatggccttggccttccccactatgacagctcttgctccacaggccaaggaactatcatagaggttctgccaaccaccaagtatgcccatgctaagtacccattcagagaggacaaggactcatcactatatacccttgctgggaatccggtcttcctcagtcattaggttctggaaattggctcaggttgagaaacagggcaagggattatgactattggggcagctcctctcagctgcctccttatctgtccttgtgttttaaaaactacatcttgaggcacacagtatcctactaactaccttcatagcttcctgtgggtcaggcttccttggatgccattctatcttgccacttctaacaatgccacttaatcttctgctagttatgcactgctacctggtctctagcaggcccattgctatcagggaccctagctcctgaaacatcttccactataagccctggtctacagagaaaagtgactattggacttctcagtgatgcttgtgtccctctcaatagcacattccttattgcttgtgataaacagcagaacacagctgacaggataggatgtaaataatatgtcattcccacttctgagtcttttgctcccttcttccattgtttgccaggacagctctggcctttctattttgcttagtgtggaccactgctttctccaagctttctagagccatcctagcaatctgttagctttatctcctggagtccttgccagaatgtaaatactgtagtacaggaatgtgcttatatcaatatgctctgctttatttagcattattttctcctccctccccaattcagcacactggggaccctttacccagttctcccaccttctgcagatgtgtatataagttgggtaggttttttttcagaggagtctctctctgtcacccaggctggagtgcagtggcccgatctcggctcactgcaaggcccgcctcctgggttcacaccattctcctgcctcagcctccagagtagctgggactacaggcgcccgccatcacacccggctaattttttatttttttatttttagtagagacagggtttcaccatgttagccaggatggtctcgatctcctgaccttgtgatccacccacctcggtctcccaaagtgttgggattataggcatgagccaccgcacccggcctaagttgggtaggttttttagctccttcaggatacagtgcctctcctcccttagcaggtctagcattttcttaatggggttatgtgtgacttgaccttagttattggtctgttagacaggtggaaaagtgcaggtagatctgaggagagcgtgtgttgccttgcaaggcagataatacttcttgatcttcaagcaagggggtggggtgctagtttcttgagggaggagtgggacacttctacaaacccagagcactcaaggtgatgtggggttttaaggttctcaagtgcattgacccagatgccccatctaaagtgtcagggtcccacttctcaactatgcccctgaccttggtatagtacactcactagggctgaaaacctttttggcgttcttctgctcttataattaaatcctgagcttcatcttccgctttttctgccttatgcagctcctacttcctttatatgctgctaaggaggcacactggctttcttccttagcctttaattggtgattcatcatcctcaacctttcattgtctttctccaaagcacaggtttactccatcagtagccatccaatttcattgttcttaaactactatttgccctatattgttaaaatgcctgatagattgcacctacgagtgcattgttccactgaggttacatcccacccattccagctcttcaccattgctgaaagttttaacatcgtactgctatggcacgccggggcctgtcagggcttcccctgtggaccttactgctaactggccaggggaatgattcagctccactggatcaaaccacattcatgggacgtttttgtccgtttgttttgagacagggtcttgctctgtcacccagcctggagtgcagtggtacaaacatggctcactgcagcctctacctcctgggatcaagcaatcctccagcttcagcctcctgagtagctgagatgacagctgctcaccgccatgtccagcaaatttttttattttttgtaaagatacgattttaccatgttggtcaggctggtcttgaactcttgggctcacgcgatccacctgcctcagctcctaaagtgctgggattacaggtctgagccatggtgtccggccacactcatggatttaattgcccttggaatcaacaccgtgcaggaaaggagtaggattgagcagaaaaagttgaactaaatgtagttacagcaaatgcctcagcttccggatcctaagggagctctggtgccaggagagcccttcagagcagccccaccctgagccctgcatctgccagtcagtgcagacggacctggtgagaggcagctttcttcagctgaaggcaactcctggaaagggatttagctgataggtgttgacaagtaatgcgcccagcagctgaggaaatgagcaccttagtcctgaagagtggtgtgctctttggtatgctgggatggttggttgtgccagtggagatgggggtggtgggcagaatgaagggaatactactgtaaaagctttttattttttatttatatttattcatttatttattttttaagacaaggtctaactctgatgcccgggctggagtgctggaatgcaatgacaccatcacagctcactgtagccttgacctcctgggctcaagcgatcctcccacttcagcttcccaagtaactggaaccacaggcacatgccaccatgcccagctaattaaaaaaaaaaattttgtagagatgaggtttcgccatgttgcccagggtggtctggaactcctgggctcaagtgatccacccaccttggcctcccaaagtgctgggatgacaggcatgagccacggctcccagcttggaacaaaactcttcgaagaaaaaattggcagagcttgttgcctgaccaaaaaacagaggctgaatgagagagatgcatttaaaacaatacgaaacactaagggttccctgaatactgttggacagtgcaaaatgggggaagttaggatacaaatctaattctgttctactgtaaggctcatgccttttcactagactagtgctggtcaaactggtgttccatgggctacattcagacagcagacgtattttgtttggctacacagcatttaaaaaatgtaaattggctgccactatgtaaaaattggaagagtttatatgtaagttcagatctctagcttctcttgagtaactagaagatctagcaacactgggtcaacattcctgcatggcagtaactggagttgagtgacagatactctttaaatggagagagtatctcttatctggataaatggaggtgggtatatgcttcttaattcaccacagtctctatgcattaccttctttggcattttttttttgagatggagtcactctgtcgcccaggctggattgcagcagcacaatctaggctcactgaaacctcagcctcctgggttcaagcaattctcctgcctcagtcaccctagtaagtagttgggattacagccatgtgccaccatgcccggcttttttttttttttttttttttttttagtagagatggagtttcaccacattggccaggctggtctcaaactcctgacctcaggtgatctgcctgcctcggcctcccaaagtgctgggattacaggcatgagccacagcgtccagtcttctttggcacttttgtttagcattcctgccatatgtactatgtatggtctaacaaagtacataatacataacaggcatttgggtacttttatttttatttattttttagagacagggtcttgctctgttgcctaggctggagtgcagtggcgagatcacagctcactgcagccttgacctctctagctcaagtgatcctcccacctcagcctcccaagttgctgggaccacagatgcacaccactatgcctaactaatttaaataattttttttggtagaagctgggatctcactatgttgcccaggctggtctgaacttctaggctcaagcaatcctcccacctcggcctctaaaagtgctggcattataggtgtgagccaccacgaccggcccatttggacacttaatactggttcagcagaactgaatgaatttaattggagaggaagttggggtgaagtctaggcctctgactataatgagaggtttggcactgaggggaggcaacagaacagggagtacaaattaggatgaattaatgacatgctggcaggagcttgagtaaaggaagaagagcagagggccagggcctgaagtttgggtgtcttaccacagagctaaagaagagtgggcaatggtagactaaactagagaagaagaggagagaaaggcacagaggaacttcagcaacggaatgccagggaaggcaagggagctgagggtttgggcagttgcatccagtgtagggaagaagatcagggagatagacaggcaaaaagccatggcaacaaggaagtagttagggactttcagaggaagtatgagaaaaggagaggaaggtcataggtctgaagtttagcagtgcagtagggggcactggaatactatcttgggggtatgagtgagtgctttttcaggggtcctacttgggagaaacatagatagacattcatttaatattcatccatttctttccagcatagtcatcattctgacatcatctaaaagaaattagtatctgcattgcatccttaaagaagaagggacaaaagacatgtccaaactgtctgtctgttctagtggaataaaacattaatttaatatgtattttggacaaccaccaacctagagattggaaacttttctcaaggatatatctctctgtatgtgggctactggctttgtggcttttctgtaggaaaattaaaattctagttttgttctcccttatcacccagtgtctgtgtggcttaactggctgattagcgcgtgcttggaatgtgtaaattcattttaacattggcctaggggcctgtgtggtagctcacccctgtcatcccagcactttgggaggccaaggcagggggatcacttgaggccaggagttccagaccagcctgggcaacatagcaagactgtgtctctaccaaaaaaaaaaaaaaaaaaaaaattagccaaagcagggtgacactcacctgtagtcccagctattcaggagcttgaggtgggaggatcacttcggcccaggagtctgaggctggagtgagctatgattgagccactgcactccactgcacagagtcagaccttgtctctgaaaaacaaaaacatttgcctaggtaaaatgtatcgaggaagacaaattttaaaattactcattccaggccaggtgcggtggctcacacctgtaatcccagtactttgggaggctgaggtgggcggatcatgaggtcaggagttcaagaccagcctggccaatatggtgaaacaccgtctctactaaaaatacaaaaattagccggctgtggtggcgcatgcctgtagtcccagctactcgggaggctgaggcagaagaatcacttcaaccgggaggcggaggttgcagtgagccgagatcgcgcctctgcactccagcctgggtgacagggtgagactctgtcttaaaaaaaaaaaaaaaaaattagtcattccaaagtccaatgtcagacatagattatccgttgttttggatgtaatcctcttcctggaaaactggcacaacccaattacacatgaaatcctttcaactctggtattggaggtatagggaaggactttgttttaggagacccatagtctacctctattgttctaggagttaaaccacgttggtttacatcctgactttgccacctgtcaactcagaccttgggcaaatcaaaggtctgagggaggagtgcaggctcccagcgttcccacgggggtggggacgtgacgtattcatcagttcatgaagttaatgatatgtattgaaaaggtttgttcaaggatttaaataagacgatgaatatattgaattaataatgaatgcaaggccttaaaggtgttttgagggtggtgaaacttgaatctctcatcaactgtgcaatagttatattaacttggatggctatgagttttgcagaggaaagctgggcttaaatcccaatgctagacctggtggctagaccttgattgccaccgggtctagcattgggatttaagcgacctctaaaaaaaaaaaatcacggaatctctctttggccttccttttttgtttctcagcagtctaccaagctacgaagaacctgaaaatcggaggtcgtgtaccttattttttctgagagcttaagctgagagcacagcctccccaggagattagcggcagagatccgcgcgctgggagaaaggctagccccagggcgccctaacttccaactccgggagcaatccaaacccggaggccggcgggggaggggacagctgtagggggcggtggggatgggagtggatgctcccgggtcagctctggcactcgccagctgagcccagcgccagtctaggtgagccccacggcggtgagggacgctcgccagacggcccagaggagttagatgacgtcacctccaggaggactcgctttttcattaatgaaaccggccggcgcgggcgcatgcgcggcaggccgccttccctctcgcttccccctcccctttcccagccgcgctctcaatctctagctcgctcgcgctccctctccccgggccgtggaaaggatcccacttccggtggggtgtcatggcggcgtctcggactgtgatggctgtggggagacggcgctagtggggagagcgaccaagaggccccctcccctccccgggtccccttcccctatccccctccccccagcctccttgccaacgccccctttccctctccccctcccgctcggcgctgaccccccatccccacccccgtgggaacactgggagcctgcactccacagaccctctccttgcctcttccctcacctcagcctccgctccccgccctcttcccggcccagggcgccggcccacccttccctccgccgccccccggccgcggggaggacatggccgcgcacaggccggtggaatgggtccaggccgtggtcagccgcttcgacgagcaggtaaccggcccgtggcgggcgggaggtgggagcggagtgggggtggggacagagtaggtgaggggaggtaggagcggccgcctcccccgcggctgcctcaggctctggaggaaaggaagggaagggaagagaagggaaggggggataagtgggggtggccaaggcgggaggtgaggggtaggaggggacagctgggagcttgggcaccctttccctcctaagtcggggggtggggccttgtccctgaccagcctccgaccctccatcccctttatcccagcccttccgcttggaaatggggatgagtgacctgggggcgcctttaggggcgcgccatctggatttaataattacccccttacttttgtttttgagcagaggtgggtaacgtttaggggttctctcttcctcttccctccgtgaccctcctaactggggacgagcgaaccctaaggcctgtcttatataccctcaataggagaacgataacattccgcccctcccccagtttcttcagcttcctctcctggagggggaagagcagaagaaagcaaggaaggcacaggttttcttactttctgctccatcgtctcatcctgccccgagagcttcaagtgcacactcactgcacatctttgtgatgccctacaacgtcgtcccccatatcctgatgacacagactgccttttttttttattgccgtttgcagtggaaaccgtggttctgaaatatcttccccttccttgataattgcagtctcttccccccccccttttttttttgccagcggtctgaggatgtgatgcattctcgagtgagaatgttggggagtaaaggggagaagggtgaaaggaaagtgagaaactgcttcagagccaccgacaacagagcaaagccagctgggatgtggtcctggagcggatcattctgctagtgtttgtggttgtttttgactctctcctggttgacaagagaactttcattgagaatatttgggatgaaaaaaaagttttgtagcttgaggaggtgactttttatcgcctgagtttcacacaataaatcctggggctgattagaataaatgcacacatagccttttgtcagtggaaattggtttaactttgtgttgctgtaggtagttggggatggtttaagggatgctttctgcagctgtgggtgcagtgggcttcctgtgatgggggaattgtttaagattgagtcaacctattttgtttactggatataatggtaaaacattatgggagctgaaggggtgggggaagagctcttctgttatttgatgcataaacatttctttacgggactcagcgtttcagacctacctggaaaatatcttggaatagacagaggaagttgagaagaagctatgtagataaaatagagttatgaagctgtcagagacttgaaggaattgttttatccattcgtatgcttccagacccaaaggcatctaaactaaactactaatccatctgaagtataatgttactgcatataaaagattacattattgatagagcgttagatttaaaacttggtagaaaagactctgtaattttaagaaaggatttaaaaggcacatagaagacttccaaagctgaaccttgtggacagcagaatctggatgtaggaaattgaaggatccacgccgcaattctccttaaattttaaaaattaaaaatttttttcagttttttcttaattttatttttttacttcttacctgttcatctctaggcttatttgccatattggaaaaagatacttaagagaggaatgattttgggctgggcgcggtggctcacgcctgtaatcccagcactttgggatgccaaggcaggtggatcacctgaggtcaggagtttgagaccagcctgaccaacatggagaaacctcgtctctactaaaaatacaaaaattagctgggcatggtggcgggcgcctgtaatcccagctactcgggaggctgaggcaggagaattgcttgaatccgggaggtggaggttgcagtgagctgagatcacaccactgcactctagcctgggcgacagagcgagactcttgtctccaaaaaaaaaaaaaaaaaaaaaggaggaatgattttgattatatacccagtaaagcaagaaagtgtttctccttctgtccctagctttaaaagaccttaaggcttcgttgtttgttatgcatattgtggaatcaaactcaccaccatctgttaaaaattaaggacattagtttttaaaacagcatttttctgcattccttatgttgtaattaagagaaagatatataggagagattattcctcactttttttttttgagacaaggtcttgctctgtcgcccacgctggagtgcagtagcttgatgtcggttcattgcaacccctgcttcccacattcacgtgattctcctgcttcagtctcccaagtagctgggattacaggtgtgcaccatcgtgcctggctaatttttgtatttttagtagagacgggggtttcaccatgttggtcaggctggtcttgaactcctgacctcaggtgatctgccccccaccccctgctcggcctcccgaagtgctgggattacaggcatgagccactgtgcctggcctattcctcacatttttctcttagaaagttaaagtctctgaccttgagatacaaaaatgtaagggttttcagtgtttaacataaggtacttatatatattatatatagtatatatataaaataaattaatatattaatttattatataagtgataaatgtttaattcaaattagagttcaccttacggttgaaaatgtcttttagtcagaaaactgaggcatgggaaggttaagtgacatagatctaataagagcttcagtatgaaaagtagtgaatgcttgaccatcagggagatacttttcctaagtatcccataaaatttgttctaatccattaaatatatttagaagactttattttattttttttatttttgagacggagtttcatgattcttgcctaggctggagtgcaatgatgcgaccttggcttactgcaacctctgcctcctgggttcaagtgattctcctgcctcagcctcccaagtggctgggattacaggcgcctgccaccactcctggataacatttgttatttttagtagagtgctgagattacaggcgtgagccatcgcttacatttttattgaggggagaaaaagccctgcatgtactgagagatagttgtataagaatcttaagagttggccgggcgcggcggctcacgcctgtgatcccagcactttgggaggccgaggcgggccgatcatgaggtcaggagatcgagaccatcctggctaacacagtgaaaccccatctctactaaaaatacaaaaattagctgggtgtggtggtgggtgcctgtagtcccagctacttgggaggctgaggcaggagaatggcctgaacctgggaggtggagcttgcggtgagccgagattgcgccactgcactccagcctgggtgacagagcgagactccatctcagaaaaaaaaaaaaaaaaaaagaatcttaatagtttcaactgtttataaaacttttgaattttggattatattatctgtactttgctttactgggcccagggggagttaagctttccttcttattacagctaagagtttgcctgttggaccacttaacgcccccagggagcatgtgcatgtctaaagatggcaactctgtttatgattgctgttttggttggatttctaatattcggtgtgattaaagcagaaatgcatttctagccactgctgattacagacatattgcactctgatgggtatcgcttagcaacttagtgcagtagactcagttaaaagaagtggatgtgtgccatattgacattttgagctcacattcttgtgggtaatataaaattccttaacctgataatattgcagctaaacctagtatttagggtctaagttgaatgagtattaccaattttagaagtaatcacctccttggttagggaaatgacagttgcacaggtggacagccagaaagctgaatgttatcagttaaatcttacatctctccttaacctgccttcgtggtgccaaatagcaagtttctaattgaaactgacaaattgtaggtgtgtagcttttttttttttttttttgagacagagtttcgctcttgtctcctaggctggagtgcaatggggagatctcagcatactgcaacctctgcctcctgggttcaagccattctcctgcctcagcctcccaagtagctgggattacaggcgcccaccaccacgcctgcctaatttttgtatttttagtagagacgggggtttcaccgtgttggccaggctggtctccaactcctggcttcaggtgatccacctgccttggcctcccaaagtgctgggattacaggcgtgagccaccacgcccggccatgtgtagcttttaattgtggttcattaacccagtttctaagcaaattagaaccttctgtgtatctcccctagttctgtatgccccactggttcctgtagagctttatttctgaagggaagtatgggaaaactatggatatttgaactaaaaaaaaaaaaaaaagaattaaaaagaactccatcccaaaatgatttgttgtaaatatgttcatttaaagcaattatattttccatatctgatcaagcaaaagtagtacataaaagccaaaaaacccaatttaaagaatatgttatggaataaactctgattttagaggttgtagtagcatatttgttgttctcatacattgagtgttcatctgaatgtacgttgaatatgcggtgagtgattcacagtataaaatgattggcaagtatcttcgaaattacaaaccacatactgattagacaaatagatttgcaaaactgaagctttttggatttaaaaaatatctcctagcctcattcttcaagcctggtgtgtaatttttataaggccttatagtagttgaaaatgagtactcttttatggtgacgaattctttatggtgagtgagaaataatgcttattcttccaattttagtatatgtggtgctgaatcgagcacaataatgcttattctttgcttcggaattttttaatttattattattgttattttaaatttttatttatttatttattttgagatggagtctcactctgtcgcccaggctggagtgcagtggcgcgatctcagctcactgcaacgtctgcctcctgggttcaagcgattctcctgcctcagcctcccaagtagctgggactacaggcgcatgccaccacgcccagctaattttgtatttttagtagagacagggtttcaccgtgctagccaggatgggtctgaatttcttgatgtcgtgatccacctgccttgacttcccaaagtgctgggattacaggcatgagccaccgtgcccggcccggaattcatcctttagaaagatttcttccagctgttcctcagttctctgcactcccttacactttccaccttatctgtctgggaactaatttagtctttatgttggctgctttcttttcacttttcaggctaagatttcctttctcttggaaatcagacgtttacttggtcctgcagctctctctctgtggaccagtcttttttgttgttgttgttgccagatactcaccgcctctactgtttatccacccatttcctttataactctgaaaagtagctcctgcctctgcttgattgctgttttcttgaaagtgattacttctggcaaaacatagtggtcattgcttagttgtaatgccactgtgatgttccactccccccggaaaccaatctcttccagttcccaagacacaatacttttctactgaattggagttccttagcgggggtcttagttttgttctgctattcagtgcctttgtccctatcctagccattagctttcctatagatccttgatttcctcatctgttgaaaaagaaatggctagaaaatcttttagattctttcaagtttaaatattcgatgattttaatattctaacagcatgtctctgtgacccagcagtctattgggagctgaccccacttgatttaccaaactctttcccattatgcctctgcatgcacctatgttccaggcaggtcacctcagtctcttctgtgtgtatcatgcttcttcccacttcttggcctttatttctgccagtctctgcctgaatgctttaattcctcctttgtgcttttctaattcctgtccatccttcaatgttcagctcagatttcattttttttttttccccatgaggttgtttcagactaaactctgctatctcacttcttggtatccttgttacctggagttttacagaaccacacagtaagttttcttcctttaggaggattgtttgaacacagcttggctttgttttctttttttcttgtctttttatcaaatggagtgcatactttctgaaaagcaaagaacgctatttgaattctcttctagtcaccccagtgcccagcacagtcttaaacacacagaacattgatggaatgtttttcatatgattcctggttgaagggtagactggctaaataaaaaaagtggtacttttggctttgttttactgaattttacttccatgtttgcaatagcctaggtctgataagtgatattttaactaggaatgagtaagaaaattagcataaagaaggaatttatacatatttatatttcctcccatagagcaaacatgttttttgaatcaggtttcagatctgatcaactacttttgtaattttggatttgtcacttactgttaggatattttgcaatggtgtgatagaatatgaatgtgaagcactttgaaaagtctaaaatttttctaatataagatttatatgttttctttatagcttattattattattattttttgtgtgtgtgacagagtcttgctctgtcactcaggctagagtgcagtgtagcttattactgattattgtgttttcattaaataagggagagtaggccaggtgcggtagctgatgcttgtaatcccagcactttgggaggcccatgtgggaggactgcttgaggccttgaattcaagaccaggctgtgcaacatagtgagatgctgtctctaaaaaaaattagttgggtgtggtggcatgtgcctgtagtcgcagctactcaggaggctgaggcaggaagatcacttgaacccaggagttcaagcatacagtgagccatgattgtgccactgtactccagcttcggtgacagagtgagaccctgtcttccaaaaaaaaaaaaagagagcgtgactagtctctggatattcctttgtatgtaccttggccaatatataccttactttagtatccattgacaagttctcttttttcttcttcttcatttttttttttttgagatagagtctcgctctattgcccaggttggagtgcagtggcacgatctcagctcactgcaagctccaccttctgggttcaagcgattctcctgcctcagcctcccaagtagctggcattacaggcacgtactaccacacctggctaatttttgtatttttaaaagagacaagggttcgccatgttagctggtctcaaactactgacctcaaacaatccacctgcctcagcctcccaaagtgctgggattataggcataagctgtggtgctggtctaatattgttacattttattttaaatgttcctgttttttgccctactctttttatttgactttttaaccattaggaaattagattcttttctcaaatctgctttattattattattattttgagacaagttctcgctttctcgcctaggctggagtgtagtggtacaattttggctcactgcaacctctgcctcccgggttcaagtgattctcctgcctcagcctcccaagtagctgggattacaggcgtgtgccaccacacccagctaatttttttgtatttttagtagaggcagggttttaccatgttggctaggctggtcttgaactcctgacctgaggtgatccgcccgcttcagcctcccaaagtgctgggatcacaggcttgaaccaccgtgcctggccctatttttgtatttttactatagacggggttttgccatgttggccaggctggcctcaaacacctgcctcagcctcccaaagtgctgggattacagatgcaagccactgcacctggccttaagtctgcttttaaaaaatgttttggctgggtgcggtggctcatgcctataattcaagctttttggggggctgaggtgggaggatcacttgggcctcagagtttgagaccagcctgggcaacagagtgagaccccatctctacaaaaagtaaaaaaaacaaataaaaaaaaaatcagccagtgtgcattggttgaaagtaaagaaaagaaaaaaaacagacaaattagccaagtgtggtagtatatgctacttgggaggctgagtcaggattgcttgagcccaggaaattaaggctgcagtgaggcatgattgcaccactgcactctggcctgggtgagaccctgtctcaaaaaaaatttttttttttaatatggagaaagtatttttgtttttcgttttttatttgggtaccggccactgcacccaaccaaacattttgtccttaaacaaaagtttaagtcatataatacagtagtaagaatgccttattttttacatctttgttctttaaattactcagattgctatggggcatttttgttgtagctttcaaatttggtattctggggttctatgtagactctatattgttgcattctaacgacatacttttaaggataagcagcgtattaattaaaaatgtgttttccacttgtgttccttaggtctgcgtatattttggaggtgtgtgtgtatataagtcaagggacaggaggtatcggaaggctctaaaggaagtttaaggaggagaatattctatagaagtggaaggggagatttgtggtcagcttaaactgttaaaaggcttgggatcaataccgaagcagaatatgagcatcttaatctgtttctttgcaaaggattgacttgtatttataaaagcattggcttgtttcatctgacatcttttaaagtaccccattttcttgggggcgggaagggagagatgagaccatttgttttgatcttgaaggacagaaaagtggttttacgttgtagtgactgtgaattaagtttaaggtctcagcaagttgtaaatttctgtatcatactatgtggtagagccttcagtaaacagagtactctcaggtgtttaatgctataggatataaactataactgctgtttatagtaccctcgctaaattctcttaaaggcaatccatttgaccacttcaaatgttatatgcctgtgatatatagttatattctctgcatataactggtttttaaaaattgtttattattcatttattttagaagtgaggtctctctttgttcctcaggctggagtgcagtggtgtgatcatagctcaccatagcctcgaactcctgggctcaagtgatctcccacctcccgaatatctaggactatgggcgtgcgccaccatacctggctattattttaatttttttcgtagagacagtgtcttgttatgttgcccaggctggtctcaaactcttggcctcaagcagtcttcccacctggcttcccaaagcactggaattacaggcgtgaactactgtgctgggtcctgagtggcttttgagccactgactatatcatcaaaaagcttctgttgagacaaagcctcaagctagtgtggagttcatcctactaaaatgaagaattggcattatgttctaaaactttacatattcttaccataaatggtactaattactttgcagtagcagtaacttgaggtgcaaacttccagattgcatattttctttaaaccatagtctggcactcacggtttggcttagggttgccactgcagtccacaagctgtcgcctgcccttattcatattttatagctttgaatgtcttattccattgaacttcagataactttttttttttgagatggagttttgctcttgttgcccaggctggagtgcaatgttgtgatctgggctcactgcaacctctgcctcccaggctcaagcgattttcctgcctcagcctcccaagtagctgggatgacaggcatgcgccaccatgcccagctgattttgtttttttagtagagacagggtttcaccatgttggtcaggctagtcttgaactcccaacctcaggtgatcctcctgccttggcctcccaaagtgctgggattacaggcatgagccaccgtgcccggctgagaacttaactttttctgatgaaattctttcctgctccacctaactcccgtgtcccacccccaccagcagagtggtatatctagcacaagaggcatgaaattaatttagtaaatagcaggactactagaaacttttaaggattatttaacttatttttaatcaaaattttatactcagataatgaccttttgggaagttatgtctcttaatgatctcaagtggtgacacttttctgttgacacggtttctcttgggtagttctcatagtagtttgggcatgagaaaacaacttttaccactttagacttgtgagggcagcctactatgtagtaaaagaaaaagcttttgattgtgcaacttgcagtgtggtcttggggaagtctcttaacctctctgaacatcagttttctatattttcatgtgtaaaatgggcatgatacttacccttctcacatcatgggcttgtttaatgacttaggtatgaatcttatatgaaaggaagctgtaaacagtcataaaaatgtattagcatctgtgcagtattttttttctatccattctttataatttggtggttattatttctactctacatgagaaaaaagttacagaggcaaaacatgttcacaatcatatgattatataattaactgagttaaactagagtatggatgtcttgacccttagatcactatctttccaataaatagttttaaaagtctaaattttactaacaggtagtacaaatatgcaaaatgagggatgtatgattgcttcttcactcgaagatggtatattatgtttttccttttaagttcatgttagagtatctgaatcttttcaagttggttagatgttagaaatagatgtaaattttaagcattatatatccttgatttcattatgtattattctcctggtcactttatcaaaacttcttcagctgttagaagttgtaacattgtttcccttttatttagttatataatacacttattgtacattcttaagtgggagaatagaatttgtgagaataccaacagaaatacacatacagctataaatatgagattatgattctttcatgttggcattgcacagtctatttttgtaaagttggtttttatattctaagaacattttacttagagtttgattacatttgaggcaaacttttcaactttggtagtatttgaatgaagattcctggatgtggtttttttaattgttacatctactttttcagtttttctttttccctataacaaccctcaaatccttcatcttgtcttttggagtatttttttctatcctcctgtctttatcggtgccttctattcctgtcccaccttgggtctgggaaaatgtgcctttatgctccatgtgagtcttcttccttttgggtaatgagtgcggagggaaaaaaagcacagtatttctttccctgttatgtttcagtttttggcctctgataagtgaatctggagtagggaatgacagtgatagtaggttttgttttagtcatatattggcgacaaagatcaacgaagacctgaagctcttgttcctctcatgacacaaactacccacaggtgcatgccaccatgccgggctagtttttaaattttttgtagagacgaggtttcgccatcttgcccaggctggtcttgaattcctggactcaagcgatcttcccacttcggcctcccagagtgctgggattacaggcatgagccaccgtgcccaaccgagattctgtctctgaaaaaataaataaataaataaaataaatacataaaaataaaataaaaacatttgaagacatcttaagtacaccctagattcccacccccaccaaaaaatttcattcattcttcaaccatttctcaaagaacatgttttcaagacacctcactatcctaattgttttccttttggtgcaatggtggtcagtactcaggcataccattttttatctttcctcccaatgttgtatgagggcattatatgaaacttaaatggatttaaaaatgctgagcttgctggacatggtggctcacacctgtaatcccagcactttgggaggtgggggagggaggattgcttgagcccaggagtttgagatcaacctggacaacacagctagtatgcacaaaaaaataaaaaaagtagctaggcgtggtggtgcatgcctgtagtcccaggtacttgggaggctgaggtgggaggatggcttgagcccaggaggttgagcctgcagtgagtggtgtttgtgctactacactccagcatgggtgacagagtgaaactctgttaaaaaaaaaaaaatgctgagcttcaggtacagtatatttttggtatgcatttgattaccagtacagtatacctatcaaaaatgttaattcacatgttttaaaataaaaagtttccaacataaaagtagagagttttttttttttttttttttttttttttctgagacagagtctcactctattacccaggctggagtgtaatggcacgatcttggctcactgcaacctctgcctcccaggctcaagccatcctctctctcagcctcccgagtagctgagatcacaggtgcacaccaccacgcctggctaaattttttgtattttttgtagagacagggttttgtcatattgtgcaggttggtctcgaactcctgacctcaagtgatccacccgcctcagtctcccaaagtgctgggattacaggcgtgagccactgcacatggcctagagagatgttataaattaatccttttgtatccattactcaatttctccctagtcttatttcatccgtattcctacccatttcctgctcactacctctttattattttaaagcaatcctatatatcatttcagcgtgatttattcttatactgactttaagagctgtgtaatataaaaacaactcaattaggaatcagaagacttgactttaagtcttaactttctactggaatgagttaacaggggggcaagccaagctgtatgagccctgaattcctaatatgttgaagagagtaacacgtggtggaggggacataatgttacctgcactttttcacagggatctatgagaatcaaagataggaggtaatatgcatgaaagtattttgtctactctaaactcaaaagcaaaagtgctttacaaaggtaagattttattagtaaatgctgcttccctgtataagtgctaacaactcatgcctaatcagtcttagaattatctggatgctgacattaaattaagtccatagtattaaaatcaccctttcacctttacccactcttggattttgacaattgcaacaacattttctcattcccaatctggctcctgttacttttcatgacttctgcaagttcactgaccacatttctcttaccatatttctaaattttcatctgtatcttggattcatgtacacttgagctcaggtaaaacagggaggtgggctcttcatgctttatgtatctaagttctgatgactctcagcaatgctttttttcagatttgaagatcattttcttttttttctttttcttttttttttcttttttgagtcactgtcacccaggctggagtgcaatggcgcgatctcggctcactgcaacctccgcctcccaggttcaaacgattcttgtgtctcagtctttcgagtagctgggattacaggcacctgtcacgatgcccggctaatttttgtatttttaatagagaaggtgtttcactgtgttgtccaggctggtctcgagctcgtaacctcaggtgatcctcttgcctcggcctcccaaagtgctaggattacaggcgtgagccaccatgccttggcctcattttattttcaactagaacaattagaaataaaaattgagttgaatagttctgcttttaatgacctattggtgctggaatcatggactctagtgattcttgttcttctttcctcatctttttgatcctaatgtattttaaaagcctttacatatttttgtctttaacatttctagttattctgaacttttgttttaactcttctgttaatttatccattgtgtgtagtgtgtattttttcttaaatgtccttataaatactgagctgtgggggaggggagaggaggagcaactggtgcaggcacgctagtttctttagaaatgtcagctctgccagatcacttaagacttgttaaaagtacagatttcctggctctactaaacatcgtgtgatttctagaggtcccaggtcatttttgacataaagctgggtttgtaaaccactgctgtgtgatatacagggagaatttaatttctgggtggtatttaataggtcacagtacagtcatatatatcactgcaacaagttagaaaaccacaattggatgaactttaaaaatcaatactaaaaaaaatattggagagctatggatgtaatgaggactagatgaattagaattccagaaatagaagagatctttataggtgagcagaggattgctgacatttgctgattctggacacacactgaaggaaaaggaaactagagaggaagtgcattttactaaaactgcaacatatccctggcccagttcaattcctgattggactgaggtgatcagcctatcttatcccttttgcctaatagaggaaatagacagctcttactgaggagatatattctggggtttctatggttctttcgtttataatactatcatactattaactattctagagatgtgaaagggtggaaaaattcaagagaaaaataaaacttatagaagcagactcagaaaattgaagttcatcagacaaagacttattttaaaataactataatatacttaagaaaataaaggaaaatacggagaaaatggatgaaaattttcatagagaattggaatccacagaaagaaaccaaatgaacattctaggaatcaaaaacacaacgttggttgcttaaggtctttatttgtagtttaattagaaactttggcgcaggactctaggacactccacctccccctcattctttactgttcttaaaaaacaaaaacaaaaacaaaaaaaacccaggtaaatttaatgtatactatttaagttccacgagagcagggcctatgtctgttttgttcgttgttgtactcccagggcttagtatagtgcatgccacattaaaaaacaaaacaagacagaacaaaatcttccttaacaccaccatcacaaacccccccattaataattaattgacattaatctgaaattaattattcattgtaccggttcagtagcagactatacacagcagaaggcaagactagagagcttgtggacagatcaatagaaaatatctagataaaagcacagaaaaaaaaaaaagaatggaaagagtagaacagagcctctgagacatgtggaacattagtaaaaagtctaatgtgtaattggagacccaaaagtagagagattagcatggaagcaaatacttgaagaggtaatgataaaatattttcccaaactgatgaaaggcatcaacctataaattcaagtagtttagcaaaccccaagcaggatgaacacaaagaaaactacacttagcatatcttaatggaactgttgaaaaccagaaacaaagagaaacgcttaaaagcagccagaagaggggaaaaaaggcactgtgttcaaaggaacgatataatacaactgatggctgactttttaatacaactgtggaaactgggaaataacagacattttttaaatgttggcaaaaaaacctgccaagctagaattctaccttcagcagaaatatccttcagacaagaaggcgaaataaagacatttttagacaatcaaaagctgacaatttatgaccagcagacctgcactgtaagattactgaaggaagttttttaggcagaatgaaaatatctcaaatggaagtacaaaactgtaggaaataatgaagagcacacactcgggtaagtgtgtgagtaaatagacaagacctattgcctcttgtttttattgctgtttttaggaactttattgctttttgctattctagaataatagaatttccacagcttttaggttaaggtaaaattgccatccaatcaataaactgcacatatttaaaatgtataatttgatgagttttgatatacatataagcctttgataccatcaccacaatcaagatgaagaacatatattaccggcaaaagttttctccagcctccttataatccattcctacctccatcccatccctagggaacccttgagctgtttttgtctcagtggatatatcataagttgtttatccattcacttgttgatggataactgaagacaactcaaattttcaccattacaaataaagttgtcttgaagattcatatacatgactgtcatttctcttgagtaaatacaaaggagtagaaatgggtggatcatatggtggatgtatataataatgttacaggatattatattctgtaatattttaagaggccaccaagctgttcctaaagtgattgtatcatcttacagcagtatatgagagtttcagttgttccacatctttgccaacacttatttaaccttttcttttaaattacagccatcctagtgggtatgaagtggtgtctcattgtggttttgatttgcatttccctaatgactcatgatattgagcatcttttcatgtgcttatttaccatctgaatattttctttggtgagctgtttatctcttttgcccatttttaaaaaattgggttttactggagttttcagaattcataatatatgctgaatacaagttcatcagataaatgatttgcaagtcttctagtttttccttgtttttttgttctcaaagtctttcaaaagcagatgttcttaatttttctgaagtccaccttatcaattaaaaaatagatcatgttattggtatatctaaggtatctttttctaatataaggtcacaaatttttctcctctgttttctgtagaaatttaggatttatactaacgtttgtggctcatttttagttaatttttgtatttgtgctatgtgcctgttatgccaataccacatagtcttaactataaaagagcttaactatataaactataataaaatatcaagtcaggtagtataagtcctccagctttcttgtttctcagaattgttttgactagtctaggtcttttgttatccttgtatggtttcggattggcttgtcaatttctattaaaaagccagttttgatagagattctgctgagtccatggatcaactttgggaagattgccatcttaacaggtattgttttttagtttcaatttttgattgttgctaatatatagaaatacatggatgtttattgatcttgtttgtttttatttaggccatagatttttttctttttctttttaaagacagggtcttgctctgtcccctaggcttcatagctcacttcagccttgaactcctgagctgaagtgattctcccaagaagctaggactacaggtacatgccaccacgctcggctcattttcttattttatagagacaggatcttgctgtgtttcccaggctggtctcgagcacctggcctcaagctgtcctctcgcctcggcttcccaaagtgcatgagtcactgaacttggccaggccgtaaattgttttgagacagggtcttgctctgttgcacaggctagagtgcagtggtgcaatcatggcttactgcagccttgacctcctgggctcaagtgatccttccacctcagcttcctcagtagctgggactgtaaacactcaccacgatgcctggctaatttttgtagagacagggtttcaccatgttggccaggctggtctcaaactcctgaccttaggtgatccatctgcctcggcctcccaaagtgtttgaccactcagcctttatacagatatttcatcttctttacaagaagaaaaacactctaagctcttgcctaaaaagatgaaaatgttctttgtaaaaatgaggatgtccttaccctcttcccaaaatgaggagcagagtctcataattgtattgatttctgggggacattcacactatctatttctaggctgtgttaattatgcctcaaattcatagttccttctgaatatcctgttacctagggactaaattgtaaagttaacctttaataaagtttgaataacatagagaagaagagggaaggaattgatttataaacttgcccgtttccctgtaataaggaagaaaatatgtatagctgctgtagaccttgcttctgtaactggttgagagattgtagttcatatttataactacttctgctgtacattccatgtttcctttgttctcattcaagatctcagctggtggggtaacctaaatcttcattaataaagaatatggctttgggaggctgaggcgggtggatcacgaggtcaggagatcgagaccatcctggctagcacagtgaaaccccgtttctactaaaaatataaaaaattagctgggcgtggtggcgggtacctgtagtcccagctactcaggaggctgaggcaggagaatcgcttcaacccaggaggcagacgtggcagtgagctgagatcacaccactgcactccagcctgggtgacagagtgagactgtctcacaaaaaagaataaaaaaaaaaaagaaaaaaagaccatgggccggacatggtggctcacgcctgtaatcccagcactctggaagctgaggtgggcaggtcacaaggtcaggagtttgagaccagcctggccaacatagtaaaaccctgtctctactaagaatacaaatattagctgggcgtggtggcaggcgcctgtaatcccagctacttgggaggctgaggcacaagaatcacttgaacccgggaggtggaagttgcagtgagccaagatcacaccactgcactccagcctgggcgacagagcaagactctgtctcaaaaaaagaaaaaaaagaatacaaatctttggtggtcctgcttcatgtgtgtgcatgcctgtggctgtggttttccattaagttttgctcttatatatataggtttagaaaaacatttcagggaatcctcagggttccagacatagtcctctttgtccccattatgtagcaacagtacagtatcacctagtaataggactgaattacatcagctaatagaataacccccttctttgactgttgatgtagtgcggtggttcttaggacagttttacctcccaggggacatttggcaatgcctggagacatttttaattgttatgactttcgtgggggtgggggaatgctactggcatctagtgggtagagttcagggatgctgtcaggcatcctgaaatgcacaggacagcccccaagagtagagactgatccagtccaaactgtcagtagtgctaagattgagaaattctgatttagtggtatggaggcagtggtcatgaggtagttgttacttccagttcagtggaactgtgtggaatcattccctgcttgggaaccaaggcctccaatccagcagatatcaaagtcgtaggtacttgaaacaaaacttctgctaatggaatttttaggaataatagaggaactacttctacttgtgccccttgattctcaggcctttgtattctagctatggggaaaacaatattgtatattgctcattgatccactgtaactgagtgagtcttcagtagtccattctgttagaccagctgcttctgggtgatggagtatgtggtaagaccagtgatttccaagttccataacccattcctgcataaccctttttctgtgaaatgagtaccttgatcaaagtcttgttgagtagtataccttgatgatgaacaaggtgtcgcccatgtccttgatggtgatgctggcagaagcactgtaggcagggaatgcatattcatattcagaatatgttggtgccagtgaggacaaattcttgtcccctccatgtatgtagagtttttgttttgttttctttttttaaggtatggtattatccactgtcattaatattttggagcattttacttccacattaaaaaagatcaaaataggtaataattatctgaccaagaaatgttttaaataaattgtagacttatgacagctatatcatctatctaaaaaccttggagtaactgtaaaatagtgacttttgaactgtagactttactcatgcagatatctcactaattttgttgaaatctaccagatagaaatccattgttatgggttgtatggttgaaaactttttaggctgtcatttgtttcaagatacagattgactcggtatactttaacatttctcatagttggccaaatttaggtaaaactatttaatttcattgaacgttttagggaaaatgcctgaatattaatagagataggatgaattaaattaaagaacttaccctttgaaaaattgccagggttagcaatttttatgctaaccctgcataaaaattgtgcgtggtggtgtgtggagtggtgtatatgtttcagagaaataatataaatgttcagataagagtatctgcgtaatctaactaggacctgtctaacctacctgcttaaggatagaggaaatcttgagagacttgaaattgaagaacttaaaattttaagtcttccctttcaaggccctatcaaaacatcatgaccacatctttgaaatagttacttttatcactcaatatagttagaaaattttatttttagaactccaaaatcattttattttattttatttatttatttttttcgagacggagtcttgccctgtcgcccaggctggagtgcagtggcgccatctccgctcactgcaagctccgcatcttggtttcacaccattctcctgcctcagcctcccgagtagctgggactacaggtgcccgcccccatgcccagctaatttttttgtattttttttttttttagtagagacagggtttcgctgtgttagccaggatggtctcgatctcctgacctcgtgattcaccttcctcggcctcccaaagtgctagggttacaggcatgagccactgtgcctggctcattttatttttattattattttttgagatggagtctcactattgcccaggctggagtgcagtggtgctattttggctcactgcaacctctgcctcctgagttcaagcaattctcctgcctcagcctttggagtagctggtactacaggcgtgccgccacgcctggctaaatttttgtatttttagtagggatggggtttcaccatattggccaggctggtcttgaactcctgacctcagttgatcctcctgcctcagcctcccagagtgctgggattataggtgtgagctaccgtgcctgacctccaaaaccgtttttattaattatattctttattaagtatatgtttgataaagacaagcatttttccttttttcactgttacattctttctgtttagaatagtgatttgcggccaggcgcggtggctcatgcctgtaatcccagcactttgggaggctgaggcaggtggatcatgaggtcaggagatcaagaccatcctggctaacaggtgaaaccctgtctctactaaaaatacaaaaaaaattagctgggcgtggtggcgggctcctgtagtcctagctactcgggaggctgagacaggagaatgacgtgaacacgggaggcggagcttgcagtgagccaagactgcgcctctgcactccagcctgggtgacagagcaaaactccatctcaaaaaaaaaaaaaaaaaaaaaaaaaaaaaaaggaatagtgatttgcacatagaagggactcaataaatatttgttgaatgaatgaatatatgaaataaaatcttccatgctcttgaagagaagtatttgtcatgtgactggtcttatatggcagaatgtcccttgtttaccattcctattcccttctaaccaaatcatgatatgtatttttaggtattctttggcatttctttttgaacacctggaaaaatgctaaaatatggtttaaaactcaatgtttgtgaattaggctgttaggtgcagcctgacttaagggataagggctgaattatagagaaattgaattatgctttcaaatatggtacgcatatgaaagtaatacatggttgttttttaaactaggttaaatgtggtaaatgcactcttttaatttagtgttttattaaattttggtatatgttgtgttataagcataaaagtttctgaaagaatttttgtgcctagaaattgtgggaattgttgctttctttaacttttgatttgaaacaatcacaaattacactggattcttaaaaatgttgtaggatctttagggagctcaactgcagtccagatgctgattttttttttttttaatactttaagttctgggatacacgtgcagaatgtgcaggtttgttacatagctatactcgtgccatggtggtttgctgcacccatcaacctgtcgtctaccttaggtatttctcctaatgctatccctcccctaaacccccaccccgcaacaggcccagtgtgtgatgttcccctctgtgtgtccatgtgttttcattgctcaactcgtacttatgaatgagaacatgcagtgtttgattttctgttcctgtgttagtttgctgagaatgatggtttccagcttcatccatgtccctgcaaaggacatgaactcatccttttttatagttgcatggtattccatggtgtgtatataccacattttctttatccagtctataattgatgggcatttgggttggttgcaagtctttgctattgtgaacagtgccgcaataaacataggtgtacatgtgtatttatagtagaatgatttataatcctttgggtatatacccagtaattggatggctgagtcaaatggtatttctagttgtagatccttgaggaatcgccacactgtcttccacaatggttgaactaatttacactcccaccaacagtgtaaaggcatttctatgtctctctctcttttttttttttcttgagatggagtctcactgtgttgccaggctggagtgtggagtgtggtggcatgatcttggctcactgcaacctccgcctgccaggttcaagtaattctcctgcctcagcctctccactagctgggattacaggtgtgtgccaccacacccagctaattttttgtatctttagtagagacagcgtttcaccatgttgggcaggatggtcttgatctcttgaccttgtaatctgcccgcctcggcctcccaaagtgctgggattacaggtgtgagccaccgcgcctggccttaagagttcctgtttctccacctcctctccagcatctgttgtttcctgactttttaatgatcgccattctgactggtgtgagatggtatctcattgtggttttgatttgcatttctctaatgaccagtgatgatgagctttttttcctgtgttttttggctgcataaatatcttcttttgagaagtgtctgtttatatccttcgtccactttttgatgggttttttttttttcttgtaaatttaagttctttgtagattctggatattagcccttggtcagatggagagattgcaaaaattttctcccattctgtaggttgcctattcactcatgatagtttcttttgctgtgcagaagctctttaatttaattagatcccatttgtcaattttggcttttgttgtcattgcttttggtgttttagtcatgaagtctttccccatgcctgtgtcctgaatggtattgcctaggttttcttctagggtttttatggttttaggtcttatgtttaagtctttaatcaatcttgagttaatttttgtataaggtataacaaaagggcccagtttcagttttctgcatatggctagccagttttgccaacatcatttattaaatagggaatcctttccccattgcttgtttttgtcaggtttgtcaaagatcagatggttatagatgtgtggtgttatttctgaggtatctgttctgttccattggtctatgtatctgttttggtttcagtaccatgctattttgtttactgtagccttgtagtatggtttgaagtcaggtagtgtgatgcctccagctttgttcttgttgcttaggattgtcttggctctacgggctcttttttggttccctatgaaatttaaagtagttttttctaattctgcaagaaagtcaatggtagcttgatggggatagtattgaatctataaattactttgtgtagtacagccattttcatgatatcgattcttcctattcatgagcatggaatgttttttcatttgtttgtatcctcttttatttccttgagcagtgatttgtagttctccttgaagaggtccttcacatcccttgtaaggtgtattcctaagtattttattctctttgtagcaattgtgaatgggaattcactcatgatttggctgtttgtctgttattggtgtataggaatgcttgtgatttttgcacattgattttgtatcctgaaactttgctgaagttgcttctcagctaaaggagattttgggctgagacgatagggttttctaaatatacagtcatgtcatctgcagacagagacagtttgacttcatcttttcctattcaaataccctttatttttttctcttgcctgattgccctggccagaacttccaatactatgttgtataggagtggtgagagaaggcatccttgtcttgtgccggttttcaaagggaatgcttccagtttttgcccattcagtatgagtatacctatgtaacaaacctgcacattctgcacatgtatcccagaacttaaagtatttaaaaaaaaaaaaaatcagcatctggactgcagttgagctccctaaagatcctacaacatttttaagaatccagtgtaatttgtgattgtttcaaatcaaaagttaaagaaagcaacaattcccacaacttctaggcccaaaaattctttcagaaacttttatgcttataacacaacatataccaaaatttaataaaacactaaattaaaagagtgcatttaccacatttaacctagttaaaaaaaaacacaacaaccatgtattagtttcatatgcataccatatttgaaagcgtaattcaatttctctataattcagcccttatcccttaagtcaggctgcacctaacagcctaattcacaaacattgagttttaaaccatattttagcatttttccaggtgttcaaaaagaaatgccaaagaatacctaaaaatacataccatgatttggttagaagggaataggaatggtaaacaagggacattctgccatataagaccagttacgtgacaaatacttctcttcaagatcatggaagattttatttcatatattcattcattcaacaaatatttattgagtcccttctatgtgcaaatcactattctttttttttttttttttttttttgagatggagtttcgctctgtcacccaggctggagtgcagaggcacaatcttggctcactgcaagctccgcctcccgtgttcacgccattctcctgtctcagcctcccgagtagctgggactataggcacccagctgtgggtttgttataaatagctcttattattttgagatgctctccatcagtacctagtttattgagagtttttatcatgaaggggtgttgaattttatcaaaggccttttcttcatctattgagataatcgtgtggtttttgtcattggttctgtttatgtgatggattacatttattgatttacatatgttgagccagccttgcatcccagtgatgaagctgacttgatcatgggggataagctttttggtgtactgctggattcggtttgccacaattttattgaggattttcacagatgctgaatttttttctgggaagaatttactttgactttttcatcctacaaaaattattctggttctgaaggatgcaggtgtttcaatggtgtcccattaatatccccaggcttagcacagttcttgcttggttataataggcaattaagtgttgaatgaatgaaagaattttaactttattctgtgggttcagggagctgttgaagagtattaagcaagtgagtggcatgctcacatgttctgaagagtgtttcctggtagtgatatagaagatggatttgaagggacagtaaaggcaagaataataattaagaaattgttataatagggatgatctgagccagggtactcattataggaaattaggggcaaccttgtcatgagatttgtttaggagatgaaattggaaggcttcagatggatgataggggtaaggaggaaaggaggagatttaagtgaataagagttgaggagagggaggagttgtaaatgacaagtttcttgtttattgttttgaataaaggggaaaattgttttcagttattcataaaggacttaaaaatgggctttgatcccaaaagttgttttgaagttatttcctgctttatctttggagacccttcttcccacccccacatcaaagcaaatgccctcaactgctttagatgcagtcttgcattgaaataggtatcacattgttttattttgcttgaatgggtgctgttggcttaaacatctaattgcatctgctttgtcttctttagttgtgtctacttatgggccaaaagagcatttctacctctgtaatttcatttgcatattggttttcagataaattgaagattaattatatgaagtatatggtttgtaatctcaattgaaggtgaattttttattttcctggttgaatataatggaatcattttggtatggagaagaaatggttaaaaatagaccagtgggtcatctcagtgtgaaagtcaagaggacttctaggcttaagcctggtagctaaatttctgttggctctaccctcttcatgatgagtccaagtttattttgatctgcatctttcttttttttaatgaatgaaattctccttcattcagcctggtaagtaacctggccattagtacgtgactaaatagctgaagcttctggcttgaattaagttataaacttagcacagtggcaggtgcttgaactgccatgttaaaactagcgcatagaatctttgccattcaaaaactgttttctcaatcccatgaaggagatgaagcctacatgggaatcttcactgattgtgctgacttttcttctacaatttttagtttataacatgtatagtttgtcaattgtgctaggatattttgttaatatgttcttaaaaattcaaatcccaggggtaaacatcaaataatttaattgtgcctatttgactttatgggagagttaacaaccatatttatatatatggttaaatgtgtataatcttcattctcaatctttcagaatccttattttccattttcatttttagcattagctgcattatttctttatacaactaggaaaagggattattcagaaatttggttgatggctttttattttgtagagacagggtctgtctctgttacccagcctagtctctaacttctagtctcaagtggtctttccacctcagccttcctagtgttgggattacaggcatgagccaccgcactggccagatggcattttaaagaataatgttaggaaaataattaatttttgcaagtgaagatagttgaaatgttagctaaaatgatgacctagaggcagcttgttttggtaaatatcttagtcagtttaggctgctataacaaaataccatagatttggtagtttataaacaacagaaacttacttctcacaattctaaagtctgggaaatccaagaataacattcctttaagcaaggttgaatgtaccagcttgggcgatagtggcaagtagcctcctattccattttgttctagaaagcattttttctcttttctattatttttgtctctttatatgtttatgtgttagggggagaaggagagagaatatttttatatttttcttttggggggatatttttatttttaaattataaatacttctaatttgcaaaggatcccagaaatagttgaagctgtctttaaacccctctctgatcccattctatcctttctgttaactactattctgaagttaatttgtactctgtccatttttatccttttattacatatgtttgtgttcataaaaaaattacagtttaacatttttacataaaaaatgttcttgtaaatattctgcaatttgcttttttaaattttattttttatttttaatttttttttgcagagccagggccttgccttgttgcctaggctgatctcaaactcctggccccaaggaatcctcttaccttggcctcccaaagtgctgggattataagtgtgaaccaccactcctggccttgcagcttgctttttaaacctattctaagacttgctccctatttatacatgagtattaagttaactcattttaactgcacgtataatattctattatcagtatgtcagtttatccatttctggtatagaggaacacttaatttgttttcagggttttttttttttttgcttgtgtttttgttttattataaacaatgcttcaggaagcatatatttgtattcttgaattttttttttttttttttttttttgagacagggtctcactcttgtcgcccaggctggagtgcagtggtgcgaactcggctcactgcaagctccgcctcccaggtttatgccattctcctgccttagcctcctgagtagctgggactacaggtgcctgccaccatgcgggctaatttttttttgtatttttagtacaggcggtgtttcactgtgttagccaggatggtctcgatctcctggcctcatgatctgtccgccttggcctcccaaagtgctgggattatatgcgtgagccaccgtgcctggccttgaatttttatttgacttaaaacatactgtgaaacttgtaagattatgtgaatcatgtttgtacagtttatacttaaaaaaaaaaaaacatggtgaactcttatcaattcacagagtaaaaaacaacattcccaatgctgtggaaacacctctatggcccaaatcacagttcttttcttaccattccccctaccactatcttgaattgtattttaaaatttcctttcttttctttatgtctccatgaacaatgtattgctttgtttacttattttgattttcatgtaatggaataatactgtaagtattctgatttcttttgtaagcatcatttttcttttgagcgttaatctatggtattgtatgcagttcattcagttttactgctatacattagttcattatttgtatatattgtatatatatatatatctgggctattgatgcacatttggattgtttctagttttttgctattactaagaatgctgcttacgaacattgttattcatgtcttttgtgcacatgcaggaatttgaagtatatgtctgggagcagaatttttcattttatggggtatgggtttgtttagctttactaagtaatgccaaatttttctaatttttaaaaatttttaattaattttttttttgagatggagtttctctcttctcccccaggctggagtgtaatggcacgatctggactcactgcaacctctgcctcctgggttcaagcgattctcctgcctcagcctcctgagtagctgggattacaggagcgagcaccatgcccagctaatttttgtatttttattagagacggggtttcgccatgttagccaggctggtctcgaactcctgacctcaagtgatctgtccacctccgtctcctgaagtgctaggattacaggcgtgagccactgcgcctggccaccaaattattttttaaagtgattgaatcagttgacactcccaactgcaatatagaagtattcctattgctctgtgtccttgccaaagcttagaattgtttctttaaaaaattttatggggccgggtgcagtggcttacacctgttcaaggccagcctggccaacgtggtaaaacccggtctctactaaaaaatacaaaaaaattagctggacgttgtggcatgcacctgtagtgctagctactcgggaggctaaggcaggggaattgcttgaacctgggaggcggaggttgcagtgagctgacatcttgccattgcactccagcctgggcaacaagagcgacacttcgtctaaaaaaaaagaaaaaaaaattatgtatctggtgggtaagaaatgttgtttcattgtaatttgaatctgtatttccttgactaccaatgaggtttagtttcttttcggatattcatagagcatttgtgttatttattctgtgaaatgtatttgtgtttcttattctgtgaagtgtctgtatatactttttgcccatttttctgtttggattgtttaatttttcctgattgattcatagcaattttttatggttttagatctaattctcttgttttttgagacagggtctggctctgtcacccaggctaaagtgcaatggtgcaatcttggctcattgcaacctttgctaggctcaagctatcctcccacctcagcctcttgagtagctgggactacaggtacgcgccactgtgcctggctaatttttgtattttttgtggagatggggttttgccatgttccccaggctggtcttgaattcgtgagctccagtgatctacccacctcagcctcccaaagtgttgagattgtagatttgagccacagtgcctagcctagatctaattctagatttgtgttgcaaatatcttttccaatttatgattggattaaaaaaaacttcggtgattgaaattcttgatcttactgcagctgaatttatcagtcttctatgatttatgttttaaaatttttttgtgtcctatcattaagataattctctattttctaaaagttgtttgcttttcacttttacattgaagtctctaatccacatggaaagactttttttgtaaggatccacttttatttttttgccatatgataacagataactgattgttccagcctatttattgagtagtgcattttttctcctgtgatctcagtgcttgcttgggtgaatattaagtgtcagtatatgcacaggctcagtttctagactctcagttcggctctctcctctagtgccagtaatccacttgattatttgtcctgattgtggttgctttataataattcttagtataaagtatggcaggtccccaaaagacttataataatgcctttccatattggttttacagtcagtttattgatttccgcaaaaaatgatactgggattttgaatggtattgcattgagtctttggatcaagttgggaagaattgattgacattgttatgatattgaggcttcctatttaagaacataatatgactttctatttattttatgttttaaaaaatcattccagttaagttttataattttctccttatataaagaacttctacataaaatgtcagtttttcctagaatatttttattatttatacatgatatttaaaaagttatattttctgattgtatatagaaatgaaattaacttatattttgtctttatactttttttttttttttatttaaagaaacggggttttgctatgttgcccaggctggtcttaaactcttggcctcaggtgatcctctagtctcagcctcccaaagtgctaggattacaggtgtgagccaccacatctggcctgtttttgtgctattactgacttatatctagattctttggggttatctatgtagacagtggatgatctacaaatagttgtagctttgtttctttatcttcaatctttttttttctctgtgcatctgttgagggcttttaatgttgaataggggagatgacattgggaagctatgtgttgtttttaattaatattttttttgtacattgacctcttctgtaccttgcacttctgttttgttttgtttggttttgtttttggaatgcagtggcgcaatcacagttcactgcagccttgatcacctgggctcaagccatcatcccacctcagcctcccgagtagctgggaccacaggcgtgtgccaccatgcctggctgatttttgtattttttttttttttttttagagatggggtttcatcctgttggccaggctggtctcaaattcctgagctcaagtgatccacctgcctcgacctcccaaagtgttaggattataggtgtgagccactgcacccagccccagggttgttgcttctttattgagcttgtcactcagtgccttttaactggggcatttagcccgtttacattcaaggttagtattgatatgtgtggatctaattgtgtcatcatgttgttagctggttattatgctgacttgttggcatggttgctttgtagtgtcactggttatgtacttaagtgtgttttttttagtgtctgataatgttctttcctttccatatttagtgctgctttcaggagctctcgtaaggtaggtctggtactaacgaattccctcagcatttgcttgcctgaaaaggatcttatttttcctttgcttatgtagcttagtttggcccaatatgaaattctgggttggaatttcttatctttaagaatgttgtggctgggtgctgtggctcacacctgtaatcccagcactttgggaggccgaggcgggcagatcatgaggtcaggagatcgagaccatcctggctaacaccgtgaaaccctgtctctactaaatatacaaaaaattagccaagcatggtagcaggcgcctgtagtcccagctactcgggagcctgaggcaggagaatggcgtaagtaaacccgggaggcggagcttgcagtgagcctagatcgcgccactgcactccagcctgggtgacaagagtgagactccgtctcaaaaaaaaaaaaaggaatgttgaatatagacctccaatctcttctgacttgtatagtttctactgagaggtccattgttagtctgatgggctttcctttataggtgacatgtcctttctctctagccacctttaacatttttttctttcatttctgccttgaagaatctgatgattctgttttttggagattatctttttgtgaaatattttgtgggagttctctttatttcctgaatttgaatgttgacttctctagctaggttggggaagttctcatgaatgatatcctgaaatatgttttccaagttgctgcctttctccccatatctttcagggataccagtgaatcatatatttagtctctttatataatttcatatttcttgggggttttgtttgttccttttcattcttttgtctttattcttgtctgtcttcttatttcagaaagccaatcttcaagcgctgagattcttttctcagcttggtctgttctactgttaatacttgcgattgcattatgaaattttttttttttttttttttgagacagagtagtgacacgatctcagctcactgcaacctctgcttcctgggttcaagcgattctcctgcctcagcctcctgagttgctgggattgcaggtgcctgccactacacccatctgattttttgtatttttcgtagagacggggtttcaccatgttgaccaggctggtcttgaacccctgacctcatgattcgcctgtcttggcctcccaaaatgttgagattacaggtgtgagccactgcgcccggccatgaaattcttatagagtgttttttagctgtatgaggtcgtttatattcttttctatactggctattttgtctgtcagctctgtatcgttttattgtgggtagcttccttacattgggtttcaacattctcctgaatctcaatgattttcattcctatccatattctgaattctgtttctgtcatttcaaccatctcagtccagttcagaacccttgccggagagctagtgcagtcgtttgttttagaggaaagaagatgctctggctttttgagtcatcagagttcttgtgttggtgctttgtcatctttgtgggctgatgttccttcagtctttgaagtcgctgtttttttttgtttttttttttttatcctatatgatgaccttggatgtttgtggtacaaggtaggttcagttaactggcttcattactggaggggccagggctcatctcaggactcccggagtacatgggtcctccaactctgggggactggcattgggccccagctttgttctctggttctttaaggttaggaacctgctgcactggaggggccgaggtgctcctggacctctggtcacaatactcccgtgggttgtgccagccaaagtgtagggggtggcagtggaatcaattcttgttcgcatgtgccagtagcagtggcagcaaggccacagggtgctggcctccatgtgggcattggcagcaacagtggcagtaaggccagggcggggggctgctggtacacatgcactggtggtggtgttagcacaggggcagggtgctggtgggtgcaggactgggtgtgccctctgtgcacgttcatgctggcttcagtggccggtaaggggtgggggtgggtcctctgttttctctgcctagtttcatgttggtgcaggggctcagtgctggtggggatggcactggtgggctctgtacctgccagtgctcccttgacaatggccatggagggataggcagggtgtactcacgctggctgcagtggcatgggagggtgcttgcacgcatgtgtgctggcggggaagggaaaacaaggtacacctgtgcacacgtgtgggcaaagcatttggagggtggccatgggcgagtgcctgcaggcaaagcagcatggagcagccttcggtgggaggagggtattggcaggctcgtgcttttccacagggatcactgtggttggagcactctgcctgtcagcaccttgtcagtgcaggagctggtatgtggccccccccggcagtactgcaagcatcctggccaggctggagccccatgagagaccagcagactgagggtactcaggtcacaccacccccaccttatgggcaagactgccctgcagagttcaggtctggcagttcctctagggctaaagtctcctatgggagcaagtcgagccttgggggatgggcactcctggccctgttgcactacagatgctccagcaccaaaacctctgagctctgccctggctggagttctgcccctaccacttctctaagcagctttccctgccagctcaagtgtccttggtggttgaggggtctccttgtggtggaggagtctccttctgcagggattccagagtcccctggtgagagtgggttgctgcttccctgttcaactcaactgcctcttcaggagtcactgggggccaggaaaaagtcccggtgcgtggtagccctgtgcagggttccttacttcttccctcgtcagttcagcatctgtgtcttccctctgtcagcactcagtgctttccctctgaagatctgctaagagtgtgccagtcatcctgatcctctgggagatgttcctactggctgcagctagttggccatcttggagccccctccctgtggcttttcatgatttctaataattacattgatgttacattctgtgggctgttcttattgaaatgtataaatttaacaaatcagttgttggtgtaaacttgctgatattttgtttaggatgtttgtatctatgagtaagattggtttgtaattttcttatatagctgttgtctggatttcatatcaaggtgattctagccttataaaatcaattggggagtttatataatctatttaatctctgtgttaactgaagttgtgtctaatatttcacccctaatgtttatttctttattttttcatgtttttttttctgtttgtgtatttcgtttttatttttttgagacagggtcttactctgtcatccagactggagtgcagtggtgtgatcactgttcactgcagccttaacctcctgggctcaagcagtcctcccaccttagcctctcaagtagctgggactacaggcacatgtcaccatccctagctaatttttaaattttttttgtagagacggggtctcaccttgttgcccaggctggtcttgaactcatgggctcaaatgatcttctttcttggcttccaaaagtgctaggattacaggcgtgagccactgtggctggcctcagtgtatttttaaagactcatttctaggccagacttggtgggtcatgcctgtaatcccagcactttgcgaggctgaggtagatggatcacttgaagtcgagagtttgagaccatcctgaccaacatagtgacaccgtttctactaaaaatacaaaaactagctgggtgtggtggcagacgcctgtaatcccagctactcaggaggccgaggcaggagaatcgcttgaacccaggaggaggaggttgcagtgagtggagatcatgccgctgcattccagcctgggccacagagcaagacttcatctcaaaaaaataaaaagactcatttcttagctttttaaactttgttttctgttttgttaattttgttgttacattttctttccttgggtttattctgctatgcatttttcccctaactttttaatgttacttatttatttattttttgagacggagtttcactgttgttgcccaggctggagtacagtggcgtgatctcagctcactgcaacatttgcctcccgagttcaagtgagtctcctgcctcagccacccaagtagctgggattacaggcgctcgccaccatgcccggctaatttttgtatttttagtagagatgggatttcaccattttggccaggctggtctcgaactcctgacctcaggtgatccacctgcttcggcctcccaaagtgctgggattacaggcatgaaccaccgtgcctggccttaatcttatgtttaaatgtggaaaaatgcacataacataaacgttaccatcttaactgttcctaagtgtatagttcagtagtattaagtacattcaccttgttgtgtaaccaatctacagaactcccttcatctcaaaaaactgaaaccctttactcattaaactagaacttcccattcctccatgttcccagccactggaaaccaccattctactttctgtttctatgaatttgactaccctggatacctcaaataagtggcgtcatacagtatttgtctttttataactggcttgtttccgttagtgtaatgtcttcaaggttaatccacattgcagcatatgtcagaatttcctaccttttaaaggctgaataatattctgttatttgtgtaaaccacattttctttatccattcaggacatttgggttactttcaccttttggttattgtaaataatgctgccatgaacatgggtgtgcagataccacttcaagaccctgctttcagttcttttgcatatgtacctagaagtagggttgctggatcatatggtaattctatttgtaatatgttgaggaactgttttactgttttccataggtatatgcactattttactttcccatcagtagtgcacaagggttccaatttctccatatcctcatttacgtttgttattttgtgtctttttttttatttttttgagacagagtctcactctgttgcccaggcttgaatgcagtagtgtgatctgggctcaccgcaacctccgcctcccgggttcaagcgattctgctgccttggcctccctagtagctgggactactggcacctgccaccatgtctggctaatttttgtatttttagtagagatggggtttcgccatgttggccaggctggtcttgaactcctgacctcaagtgatctgcctgcctcggcctcccaaaatgttgggattacaggcatgagccactgcgtctggccttatttcatgtctctttttgatagtagccatcctaatgagtgttaggtggttttatgactttttggtttttttttaatagaggtttttgctctgtcatgcagactagagtacagtatcatgagcatagctcactgcatcttcgaactcttggactcaagcaatcttcctgccttagcctccccaaagtgctgggattataagtggaagccactgtacctagcacgttttctgacttttagagttatatttaagctcatcagttttgaatatttcatttgattgtaagtattcaaagttataaatttattaaatgctgctttaattgtatcctacaagtttcaataattggctttttatttttcaatttcatatttccatataatgttttcaattatgatttctcctttcacctagagtgtttcatatgaatatgaaacatgttatggtttatatgttaccagtaatttcaaatttgaacttagctttatgaccttgaacatatttattagttatttattgttatgttataaattattcccaaatgtagccgttttgtacaacaaacatttattatcacataaagtttctgtccatctgaaatccattagtggctgaactgagtgtttctggctcagagtctttcatgaagctgcagtgacagtcttggctgggtctgtagtaatctgaaggcttgactgggggtagagcatttgcttccaagtaaattcacttacatagcttttggcaggaggcctcagttctttgctggccatttgtaagaggtctcagttcctttctacttgggcttctccatctggctgcttgtaatgtggcagctgacgtctcccagagtgagtgatctgagagaatcaaaagccacattctttcatgatccttagaagttacataccttcctgcttgccgtataatattggttatgcagaacaacccgaataccagatgagagaggatgacacacgggtgtggatatcagaatgtaggaatacttgcagaccatcttggagtctggctaccataagcatacagtccatttttataaagttttcatgtcttcttgaaaatgatatgtagtcccaagttcttgagtgtgatttttacataggagtttgatcaagtttattaagcagttcaactcttctaaattctgattcttttttgtctgctagatcttactactgagaaaggtaagttaggaaatctttcactgaattagtatgtttatgcttttttcttgcagatgtgtcagttttgtgtgtgtgttattaggtgcatagaggcttacaatatcttacagttgatttgagtcctgtatcatcatgtagtgcccctcttgatctctagtcctttttatcttagtccactccagttttctcttgtttctatttgcctgatagatctttttccatttcttaactatcaatatttctgtgcctgtatgctttatgtttgtctcttataaacagttcatgggaaaccagtctgatggtttttttttcttctgcctggagagtttagttcatttacattcattgtgatgactgacatctttggattcctttctgccattttctttttaaaatttaatctaattattattacttttttgaaacaggggtctttctctgttgccctaacttgagtccagtggtgtgatcatggctcactgcaacctctgtctcctgggctcaagtgatcctcccagctcagcctcctaagtagctggaactataggcatgtgccatcttgtctagataattaaaaaacattttttttttttgtagggacagcatcttactgtgtttcccaggggctagtcttgaactcctgagctcaagcgatccacctgcctcagcttcccaaagtgttgtgattacaggtgtgaaccaccacccccagctctgccattttcttatgtgccttttattcaactgtttcatttttttaccccttgagtctcagaatttacctctgggttcattttacttctgcttgaagcatattctttagaatttcttttgatgagggtctgttgcagtaattgctcttactttcctttctttgaaaatacagggccagcgcggtggctcacgcctgtaatccgaacactttgggaggccgaggcgggcggatcacaaggtcaggagatcaagaccatcctggctaacgcggtgaaacccccatctctactaaaaatacaaaaaatagccaggtgtggtggtgggcgtctgtagtcccagctactcagtaggttgaggcaggagaatgacgtgaacctgggaggcggaggttgcagtgagctgagattgtgccactgcactccagcctgggtgaaagagcaagactctgtctcaaaaaaaaaaaaaaaaaaaaaggaaagaaaatacagtagtctccccgctccccccacaaccacttatcagcagttttgctttctatggtttgttgcccacagtcaactgcagtctgaaaatgttaaatggaaaattccagaaataaacaattcataagtttaaaattgcatgctgttttgagtagtgtgatgaaatctcacacagtcctgcttcgtcttacttgggatgcaaatcatccctttgtccagtgtatccacactgtgtatggtacctgcctgttagtcacttagtagccatctcatttatcagattgactgtcatgatattgtagtgctgtgttcagttaacccttattttatatagtaatggccccaaggaggaggagcagtgacgctggaatattgttataattgttctttttttaaaattagttattattgtcgatctcttactgtgtcttataaattaaacttttttataggcatgtatgtgtaggaaaaaaacatagtatatatatagggttcagtactatccctggattcaggcatccactggggctcttggaacttatgccccatggataaggggagactactgtatctttatttctcccttattcttgaatgatagttttgctggatatatagaattctggacagttatgtttccctcagtatgttaaagatactatttcactatctgtctgctatcatagccattgagaattcagttgacataattgcctttattttataggtgacattttctctccagttgtttttttaggtctcctttttgttgtttgttctgtagtttcaccaaaatgtttgtaggtatatggatctctattctgctttgagtttttggacttcttgggagtgacatttgttgttgtctaacagttctaaaaagccattaccttctcaaatattgtttcttttctgtatttctattagttttcttctggaactacaattagatgtatgtaatattgtttgaggctgagccaagtagtgtactgtgattaagtttactttctggtacaactttttgtgtctcctaaatgtaatgtctcatttagcctcatttttttcatttgcttcagtttttatgtagctattgttatttctttccatcattaacacgttctcagtacagtttttcacatagggtcaaacctgttaatctgttcagtgtgaccattttccttgaggatttcctcccatgctagtgtttagaattggctgcttgctataccaggtgtgcagctatcatcctgtgttctcccttcagcatcattttggaaattcctattgcttgtctcctgtgttgattcccttgttttgtggatctcattcatttacaacacaccttccactagcttgctggaaaaaaaaaaaagtacaaaggagataaattttgagaccttgaatgtttgagaatgtctttattctaccttttttgaaaaaaaaattgataatttgtctaggtcttaagttctaatatgaaataattttttttctcagaatttggaaagaatttctccattgccttttagtttatcactgagattattgctaaccccaatgccattctggtttctgttacgttgtcatcaatctgtttattttttcttttctagaatccttggaatttttttttatttgtccttgctattctgcagttcaataataacatgttgggataccaaatgggtcttacttagtttagagactcttcaagtctggaaaacttcttgtgttattctctggcaacgtcttcctatcttatttattaatttttttctttttttcacatgttggaattgattactcatgtaatgttttacatttttttctttcatggtctttcttttgttctttttttgtagaaaatatcttgactttatcttccaactctttaatgttttctttctttctttcttttttcttgagacagggtctggctctgtcgcccaggctggagtgcaatggcacgatctcagcactctgcaacctccacctcccgggttcaagtgattctcctgcctcagcctcctgagtagctaggattacaggtgcctactaccacacctggctaatttttgtatttttagtggagacaaagtttcactatgttggccaggctggtctcgaactcctgacctcaggtgatccacccgcctgggcttctcaaagtgctgagattataggtgtgagccactgcacctggcctgctctctctattttaaaaatagcattctttagtttttttttttttttgagtcagcgtctcgctctgttgcccaggctggagtgcagtggtgcaatctcggctcactgcaagctccgcctcccaggttcacgcaattcttctgcctcagcctcctgagtagctgggactacaggctaattttttttttttttgtatttttagtagagacggggtttcaccgtgttagccaggatggtctcaatctcctgatgtcgtgatatgcccaccttggcctcccaaagtgctgggatcagaggcagcattctttaaatttttaagtattttttaagatactaataatttaccgtattttgaagttttcttctcattcttcattatcttttttctcaaaattaattgtgtgtacttggttctttttctttcatgttaataaggtttccttatacctggtgattctgagctgttttcactttaaatatctaagttttgtttgtttgttttttgagacagtctcattctctcgcccaagctagagtgcggtggcatgatctcagctcactgcaacctccacttcccaggttcaagaaattcttgtgcctcagcctctcaagtagctgggattacaggcatgtgccaccatgcgtggctaaattttgtatttttagtagagatgaggtttcaccatattggccaggctggtctgaaactcctgtcctcaagtgatcggcctgcctcggcctctcaaagtgctgggattacagcatgagtcattgcgcctggcctactcttagatcttaaatgttttacacagacacacacacacacacacacacacacacacacacacacggtaactgtgatgatggatgtgtcagttgatcgtggtaatcatttcagaatgtatacatctattaaattatcatgtagaccttaaattattatttttgtcaattatacctcaagctggaaaaaaatgcagatctactcttaaatgtgagataattggaagctcatgtgcatgggctagggtaagttggtggagaactaactttattgttggaggctttctaaatgtatgtcttttctttgaacattagtttgttccagaaaatattgcgtggttggttgcctgggaagatgtatgtctgattttcggacttggaagcaagataaaggaaagaggctgctggtttatggtatagagattttcactcgttaagaaagtaacaaagtaaggaagtaggattattgtagaaatattattttacagttcaagtttgtaaaacacaggtgaaggtaatcgttggtgggtctcttcctctgagatcaccaaattatctgtagactggttggtagacttggagagaccacttgttcttggacaacagttagaagcatactgccctaagcagtaaaaaggtgattgttgagggcagcaagaggcggtgtaacataccagttcatttttcttttcttagcaagcatgtactaattgccttttaaaactcctgaccataggggataaaacgattacaagaaagataccttccctgctcccatggaatttacattctagcacaacagtggatattaaacaacgtatcatctggttatgtaattacagtaataagaatcatgtaggagaggtcaaggaagcttactgctgtggggttcaggatggcatctccgaaagtatgaataaggaaagtggtgggagaataaaaggagagtggcagagactcagactgagagattaattgagataatgacaattgtgggattcaatgaggtgtataatgtgtttagtgcctggtacttgtgctcagtaagtgctaattagtagttgtttatagcaatactgttatcttggatgatcaaatagaagatccctagcaagtaattttataaagacaaaaatttcgtgtcaactctgtaataaaacaatatatccttagaatcagttatcacttaaaatccttattttatagaaatttttgtgtttcaaaagtatagctagggcaagtcccccttcagggtggatacttaaaggagatgaaatcacttcataaaggtgtctgcactcccatgttcattgcagtgttatttacaaggtagccaagatatggaaacaacctaaatgtctgttgatggcaaattgataaagaaaatgtgtgtgtatgtgtgtgtttatacaatggaacgttattcagcctttaaaaagaaggatattctgtcatttgccacaacttggttggaccttatgctaagtgaaatagaccacgcacaaaaagaaaaatactatataatctcacttatatgtggaatgtttttaaaaagtcaagtatacggagacagagaataaaacagtggttaccttgggcaggaggaggaaggaaatggggttatatagataataaaatagcagatatatagaatgaagaagtctggagagcttatgtataacatgaagactatagttaataaaacaaaactgtattaaggatttttattaagtaatttagctgcttgtaacacttacacacacacacatagtaactatgatagatgttttcactgtagtaaccattttgctgtctatacacatcccaagatatcagcttataaatctcatatacacagatttttttttttaaaggtattgttggggcagggatcaggcttaactttgtggttgtatctgtagtacccagcacagtgcctgacacatagaaggtgttaatcttgttttttttttttttaggtatctgaaatacttaccagaaattctattctttcagatgagagacatctatgtgattttaggtattaataaaagaaatattcttccttttttcttactacggtgttggtagtggtgctctttcttcagggacatcattgatggccttttagttagaatttaaatgttatcctttctgtagccagcagggatctgttgggataaagtcttatttttcttttcttgggagtaattggtgctttctaacttttcagcacttagactcacaatgtattagttatctattgctgcaaaacacattacttcaaaacttagcagtttaaaacaacagacatttattatcccacagtttctatgggtcaggaagataggggtaccttagctggatgcctctggagcacggtctcttgaggttgcagtcaagctgttggctggggctatatcatctgaaagctttactggggcaggggatgatgtacttccaagttcactcccatgattgttgggaggaggacttaattccgtttcttgtgggcttcttcctggtttatgtttgttacctggtgtctagagctgatgtattgggtacttcccctctagcatggttattttctttgttttttctctcatttaggtgaaaacttaggtgaattttaatgtaaaccctacccccattatggtctaaggggccttttagaaaatgagtagaatgtacacagaggcaaaaattttagcctgtgaccttttgaagaattttctaagtgaaactagaaacaaattaaccattgttcacagagtgctttgcttaatgttatgccttcttttgctaaatcctcttgtttgttgaaatcttacatcttaagttgctgatagtttgttaatagagatcataattaaaaggtgattatatttcttcatgcagtttagctttacatttcttccattatacccaaagatttctataatatagcaagaaatgtttttaaaaagtgtttttcctcaattgtgtgaaagtaatgtatctaactgaaaagaagagaaactcataaaagtaaaaattttaaaaaatcaccttattcttacctctcaaatacaatgacctcatattttaaattttgctcaaggttttttcctcctcattctaggcataattattttcttatatgtgtttcagtattactttttttgtgaaaaatatggttacaaatgtggtctaatttcattttgcactttaaaaattattaatgaggccggaaatgaggccgggcactgtggctcatgcctgtaatcccagcactttgggaggccaaggtgggcagatcacgaggtcaggagttcgagaccatcctgggtaacacagtgaaaccctgtctctactaaaaatacaaaaaattaaccgggtgtggtggcaggcgcctgtagtcccagctactcgggaggctgaggcaggagaatggcatgaacccgggaggcggagcttgcagtgaaccgagatcgcgccactgtactccagcctgggcgatagagcgagactctgtctcaaaaaaaaaaaaaaattattaatgagatggtcatatttttatgttatttactgatcacttacctttgaattgccccttgtttcttgaagtttttccaataaatattcttattaataggcaagacaacctgatctgttagttatgtaaactttttggtagctaattgtatgtgcattcttttacctcccgtttgtttctttattagcagtgtctttttgttatagaatttatacattttcttgtaagcaaatatcagtgtttttattataggtgctgtatgtttgtcttgcttaggaaaatctttattactccaatattattaaattattctttagtatttgtcctaatagctttatggctttgttttttttaaatcacacacacacactcacacacacacacggacacacacactctttgagacgggtcttgttctatcacccaagctggagtgctgtggcgcaattatggctcactgcagcctcaacctcctgggctcaagatatcctcccacctcagcctcccaagtagctgggactacaggtgcataccaccacccccagctaatttttaaatgttttttttgtagaaacagggtctcactttgttgcccaggctggtctgaaactcctgggctcaagtggtcatccttcctcagcctccccaaagtgctggttttacaggcatgagccaccacacctggcagcacccatatattttaaaatttagtatgaattagtcttttctttttgatgtggcataattgtattgactaatccattctttaccattgatttgaaataccacctttattatattaaatttgtgtgtgaatatgaatatcttttctgtgattgcaattaatttgtacttgtacagattgtgctgtaagagcttaacagtatatttcagtacttggtcatgtctcttgttcttgtttttcttttcttttcttttttttgttttgttttttgagacagagactcgctctgttgcccaggctggagtgcagtggcgcagtctcggctcactgcaagctctgcctcctgggttcatgccattctcccgcctcagcctcccaagtagctgggactacaggcgcctgccacgacgcccagctaatttttgttgtatttttagtagagacagggtttcaccgtattagtcaggatgatcttgatctcctgacctcgtgatccgcccgcctcggcctcccaaagtgctgggattacaggcttgagccactgcgcctggccttgttcttgtttttcaaaaatttctttggtattctcacaagtttattcttccaaattaacttcagaatcagcttaccattttaaataagcaccccccttctaaatctattataacatctcactactttctcttctattcatattagcttaacttaagctaccatcctctcttgagtaagactgttttctaacatacagcaacaagagggttctttttaaaacataaatcagattatgtcattcctttgcttaaattcgttcagtgcctttttcccctgtcttttggttatctattgctgtataataagctactccaaagccttgtagcctaaaaacaaccattttattgtgctcacaatttttgggggtcaggaattcatgacaggttcagctgggcagttcttctgttccatattgtgttgctgacactggagaatcccttccattatggcttcttcagtcacatgtctggctcctcagtgtttcttggcctctctctccacaatggcgtcccattcttcagaatctctgcatgtggcctcggcttctcacagcatgctgatctcagagtagtcccattttttacatgacaactggcttctaggaagagggaaataaaaactgtcagaccaattaaggactatggcctggaactacacagtgtgcctttaagccgtattttattggtcagaatagtcactggacctgctagatgaaaggaggtagaaaaataaatttcttttcctaatgagggagtggcaaaatcttattgcgggaaagcatgtgggatgagagatacttgacagttggaaaatataatccgtgacatcgtcaaattcaaaataaattcagagttcttaaaatggcctataaggcttttcatgatctgactcctgcttcttgaatctctgaccgcatcccctagattttcctcttcgttccctttgggttaaccacattggccctcttgctaggctttgaacatgccacacccaacatcagatccattttacttgcaactactgccgtgaatgctcttctttagatctttgcatgggtcttcccgttctcattcattcattcattttgagacagggtctcactctgttgcccagactggagtgcagtggcacgatctgggctcaatgcaacctccgcctcccgggttcaagcaattctcccacctcagcctcctgagtagctgggactgcacgcatgtaccaccatgcctggctaatttttgtatttttgggtttcacgaggtttccccatttggccaggctggtctcaaattcctgacctcatgtgatccgcccgcctcagcctcccaaagtgctgggattagaggtgtgaaccactaatcccatggctggtcttcccatttttttacttcatttaggtctctgctcaaatgtcacatcttcagagagcttcccctgaacaccttatctgataaattcttggttacttagaactccttaatcttgatttttttttccttttcatagaatttggtgctgttagtaggagcctggggggcctaagtaccacttttcttccttccctgcctggcttctgagcaagttgagaaatgagtaaaggtggaggccaaaatatattttaaaaattcttctgactaaagggagatgaagtaaagggaacaaaagaagtatcatgaagattctcagatgtccgacatgggaaactgggtagattgtggtactatttaccaagacaggaaacatggtaggaagattatgaattaagctttggaaatgttgagtttgaagtgcctacaagttatccatgtggagaaaccaaatggacatttggataacacatctgaagctcaggagagaagtttccattacagattcaggtttggtagttgttctagttttctattgctgtgtaacaaactaccacaaacagtagcctaaaacacacaaaattactatcttacaatttctgtgggtcggagtcaaggcattgcttagctgtgttctctgctcaggttctcatcagcctgaaatcaaggttttggttggggcctcagtcttatctgaggcttggggttctcttccaggctcattggttgttggcagacggttcaggaatctggggagacaagatttttgggagcgccaacccagatgtttccattccatgtgtcagagtcttgttctttcctagccaggcccctgatctggacgtaggagacctgctgcctttgggagttcaacctttgaagcccaacacatacagatttagatatctaatctgtctgtccatccatccatccatccatccatccatccatccatccatccatccatccaatctgtatatctctgagatatataagtgtaataaatgggcgataatcaagtgctggttttggtccttaggtttctctgccctcctgctgcaggagaggagaatctctgtgttttcagagaggttctctggctttcaaacttagttttcaattggaagttaatcagcttttttgtttttatcttttttctttgaaatcaacatctgggagtgaggagcactgggcaaatgcagtgcaggcccagcaccagctttggccaacccccacggggagcctggagcgagaatgggagcctgggacaagaatggctcttctgagttgcccagaattgcggtggctgatgtgtccaggccttcatattgccatatcaattagtcatttgatgtgggttatcttgggaaggatatgaccttgaacagggttgttccttgtaggtgaggcaatccctgaaggggctgactgacagcactcccagcatttaaggtaagtccttttttgaaggaggaactgggtagcacctcagtgtctaccacgatttctctgtatccaccaaatggccaatttgtttttgttttttattatcattattcattcatggatttaaacatatatttagcaaactttctgttaaattatgtgtatagaaaagggcacaaattgtaaatatacagctcagttaaatgttcacaaagtaaacacaccagtgtaaccagtatccagatcaagaaataaaacaatactgtgaatctaggagtcctcctcgtgtttcctttcagtcactgttttccagggatctatcctgacttctaaaatcatgggttgaatttagcatggttttgaaatttatgtaacatcatacaatatgtcttgttctgacttctgtctgtcagtattgtatttgtgaaattaagctcacaattgtaagtcattctcttgctgtatattttttcatggtatgactataccagtttttaaaaaccatttctgctattaacatttggattgttccagttgttgggaattataaaacatgctgctgtaaaacattgttgtgcatgtcttttggtgaacatatatacatttctgttgggtatatatctagtgaaattgctgaatgtgtgtgtgtgtgttcagttttagcagataatgccagtttccaaggtaagtactgagttacatgcctactagtagctcctaagatttccagttgctgtaatttgctcctgtttgtagaagacacagccttcgagggcttatcactgagaactgtatttactaaggtctccactagcagattctgaactcttttgtcctctcgaagctgcaaggctttcaaattctgctttgcttttcagaagtttttagtttagcctttttaccctcttccactcactgaggcatttgagattccctcacgtcttcagttttgccaatctagccctcagtgaacaccagaatctctgatggtttcttcttccattagaggtacattgcctgggaaaaaagccttatttctcaatctgttttcctgaccagaatctgcaaatgccccaggggaaaagcagctgcagaagatccccttacctcattatagctcactctttttggaatcttagtgttgctaatccctattccttcagtagctctctgaattcttcaaacaggtgatttttatatttcatcttttgttagaaattaagtttgtggtgggagctattgttttgcagtaaattattctatcctacatggaaacagtagtatggatttaaatatatttaatatgtttcaataaattgccatccttaagtgttcaaattattacacttttggccagtgggggcctctttaaaattcattcctaaccatttttggcttgaccgttattagtcagtgctgctatctggtatgacaagatgttccggggtcattatgtcttttttttttttttttcctccagacatagaagcagccatttcctaaaggagtccagattccttttactgggaaatggtcgttcaagattacaactgagtgaggattactatgggattggtcattagtcattactatgggattggtcattgtttctaggcattttcattggacagaaatagaaatatgttttttaaagtacaaaataaaatatcttgacttcatatagatacttctatttcaaattcaagactacatttctttactttaccattacttttatttcccatgctgaaagtcttgggtttttagaggcactaggagtcatagaattaaaataccacagaattatttagttcctctctttataccattaaataattagatacatttataccattaaagaattagatacagttttcagttgatttgtttatttttgatttctagacttcttaaaattttaattttatgtttatgtaagttacgtagttctaaaatgaaatctacaaaaacaatatgtattccatatagaatatggattctatccttttcacttctactttcttttcatttcctaaaggcaaccactaatttttttgagcatttcattcttctactgttttgttttgtttcttaatataagaaacatatatttctatctcctccctcttcttagatgaatggaacatactgtgtatattttctccatcttgttttttttttaacttaagatgtgtcctggagattattctatcatttaatgaatttggattcattttttggttttacgttacattttatacatgtcttttatttaagtgtcactgtgttcatgttatttgctctttcagcatatataaatatatacacttatatacatgtacacacacacacatacacacacacacacacacacacattttttgagacagagtcttgctctgttgcccaggctggagtgcagtggggcttagctcactgcagcctctgccccctgggttgaagcaattatcatgcctcagcctcccaagtagctgggattataggcacgcgccaccatggtcaactaatttttttgtattttagtagagatggagtttcagcatgttggccaggctggtctcgattgcctgccttggcctcagcatatatttttgtatttagaaagatttattcagaccagcgttcatactgtgtaatgataaggaatttattgtagaaattagattgtatacagttttgaggggactaagtgaggtgagtatctggaatggggaattggaggatcagaggagtccactaaccagatcgtccaaatcaatgacaatgggtagataagttggagctgttggggaaatctgagaagtcaaatatatccagccactgaagtgagattatgaaggaggagcttgaggagggcactgtgggaagctcttgccatgtaaggtttgtcttacaaagccctgtaggtttgcacccaagcatctggtggtaggtttgggctagtattggtcagcaaagtgaccactggtccaaagaaagagctggacatggagtgaaagagagagagagtaaaagctggaactttctgggtgcctctgtatctgtctctcattgtatgttactgtgaaaccttcagaataatagctgctgcttcgcttccacatttcaaacaaattttatacaggtcgagtatcccgtatctgaaatgcttgggaccagaagtgttttggatttcacatatttttgggttctagaatatttgccttttactcaccgtgatcatccctaatctgaaatgagcatttcctttgagagtcatgttgttgatcaacaagtttggattttagagtgttgtaggtttcagatttttcaattagggatagacagcctgtacaaattaccctttagaccaactctaaccagaaccatatagtgagtgggatctgggaaagtagttcccagcttaacagttaacacaccacgcaccaccagtacaatttgtgtttttgttctggtggttaccattatattaatacctttatatggtattctaatttccttctcttttggggtggaggggtattatgtgttggttttttactctgagcaatattgaaatgaactagaaacctcctttcctcatctcctttttccctagcattttactctcagttaataacaagacaatcaagaaacatattctactatttatatgctctcaccaccctccctctcctcattttgataattgtattgtatctatattatcaagtacataaagcagtcacctaatatactttctcccttattgccaccattctcagttcttttagaaaacacagtgatgctccggctgggcacggtggctcacgcctgtaatcccagcactttgggaggccgaggtgggtggattacctgaggtcaggagttcaagaccagcctgaccaacatggtgaaaccccgtctctactaaaaatacaaaaaaattagccaggcaatggtggtgcatgcctttaatcccagctactagggaggctgaggcaggggaatcgcttcaaccttggaagcagaggttatggtgagctgagattacgccactgcactccagcctgggtgacagagcaaggctctgtctcaaaaaaaaaataaataaataaataaaaatacagtgatgctccacataatgacattttggtcagtgatggactgcatatgtaatgggagtccctcagtattataatatggtatcattaccttttctatgtttagatacacaaacaccatgtgttcaagttgccaagagtattcagtacaataacatgctgtacagttttgtaccctgtataccatatagcctagaggtgtggcaggctatactatctaggattgtataagtacactctgtgatgttcacatgacagtggaatcatgtaaggacacatttctcagaacataccccatcactaaatatatttaatgattcctattaatgtggatgtctttccaattattctggtcatctgaagcatattctctagtatatcctccaggaaaaggaaaagggaacaaaatttccagggttcttgccgtttagcacagtttgtcattgctataaaattgtctctcagtatctgggacattggttccaggaacctccatggacggtgaaatctgtagatgctcaagtccctgatatgaaatggtgtggtatttgcatatagcctacacacatcctcctgtgtactttaaatcatcccttgattactgataatacttaatacaatgtaatactatataaatagttgttatacactattatttagggaataatgacgaaaagtctgtacctgttcagtacagacatactaaaatttattttttgatctgcagtttgttgaatgcatagatggagaactcatggattcagagggctgactgtatttgaattcagtttggctagatataaaatccttggtttatgttttcttctttttttaattatactttaagttctagggtacatgtgcacaatgtgcaggtttgttacatatgtatacatgtgccatgttggtgtgctgcacccattaactcgtcatttacattaggtatatctcctaatgctattcctcccccctccccctaccccacgacaggccccggtgtgtgatgttccccttcctgtgtggtttatgttttctttaaatatcttaaatttattttactttattgttttctgacataaaattttgtcaaagtctgatgagagtctaatttttgggttttttttgtataaataatgtcctctttctgcctgtaagttcaaaagattttttttttcttgttcacggaagttcaaaatatgttaaggtattggtcattctgggtcacttttccaggtgtgtggtatgcacattaaagatacagtttcaagtttttaaaaatttcaataataatttcagcaaagttttcttgaattctagtttctaatatccactttattccattggtttggtttctttctttggtgactcctgttatatgtatgttgaatcttctttttctatctttttttgtcactttattgtaaatttttattatctcgtatgtaatttcttttttatattacaactttcctccttagtccccccttttttttcaacatttgtttactcttaaagcattatcttctgtgttaatttactcttatgtatcttctggttagttttcatttctgaaatgatttatcttctaattctttcttgagttctgtcaacttatttctatctgtaattcttatttgtgttattccacatcttttgtcattttcttaatttctcttggctcactttgaaataataatttacagttttcatctgttggtggatatgtctttttggaaactttgattttctgttgtttagacccttatttttatgtttttctgtttcttactcctttttcttaataataactttacatattatttgaccatagaacttttctgttggcttatttttatgtgaaattaatttttctgaattggtaggagggatttgtaggccaggatagctttgtagctttatgtctctagagcttattctttttttactttcatgaaataaaaaaaaaatggtctcattctttcagagatctcttgttcatctctctctttttcatttttatttggacctttttccttttctccctttacccctgttttcagtttggagttcattctcagcagtttcttctcagtgtgggctagaactgtgctgtccagtcagatctaataattacatgtgtggctacttaaagctaaatttaaataaactttatttaataataacttaaataaactttaaacttttgatttcttgtctataccagctatgttacaagtggttaatagctacatgtgacgactagtggctgttgtattgggcattgcccatgtagagcactatcattaccacagcaaatcctattagacagtgatgcttttgagtgtgctccattctcttgagacttttatcataggcctttttcattcatctgcaaattgcaatgagcataactaccctctgttttggctaatattcctaaattgggctgctgtgctttttattaaggatgcagtacattgggaatctcctcttgtcagatccattagacattctccttccacctgctttctcttgcatagatgcttataccacattagtatttttgttttttgttttccagacacaggatctcgctctgttgcccaggctggagtgcagtggctagatcacagcaactttctgggctcaagcagtcctcctgcctcagcctcttgagtagctggattacaggcacacactaccaagcctagattttttttttttttttttaaagtaaagatgaggtctcactctgttgcccaggctggtcttgaactcctggactcaagcagtcctcctgcctcagcctctcaaagtgctgggattacaggcatgagccattgcgcatgtccccaaccagttttgtaactataaatggtttgtttctatttgttcacttctctgggtttgggaatgagggaccttgtcccttcattttcatgtagatattcatcagtttgtgtttttactagagaagttctagtttctttgattttttttttttttttttttttttttgagacagagtctctgttgcctaggctggagtgcagtggtgcgatctcagctcactgcagcctccacctgctgttcaagccattctcgtgcctcagcctccctagtagctgggattacaggcatgtgccaccacgctcggctaactttttgtatttttagtagagacagggtttcaccatgttggccaggctggtcttgaacttttgacctcaagtgatccacctgccttggtctcccaaagttctgggattacaaatgtgagccaccgcacctggccatttctctgatttttatgggatacttagggagattcaccagctgcattttatgaaaccctagttcaagaaacatactggaaaaggagatatggtcacaaagaataggagatgtttctaagggaaataataaattaaaatgaaagttacagtgacttgtgctcactgaatctaaaacccagctgattaaaaatttggcaaaataaaattaaaaaggttatctgtgctcgtaaacaaaagtcccatttttggcctttcaggtttttttcctccataatctttataattaacattacgaagttctgtagtttctgttctgccccctcctttacactctaaaaatgctgccccaccccgccaatttcatttagtatttccttttttttttttttttttttttatttgagatggagtctcgcccgatcgccaggctggagtgcagtggcgtaatctcggctcactgcaatctctgcctcctgggttcatgccattctcctgcctcagcctcccgagtagcttggattacaggcacgtggcactacacccagctaatttttgtatttttagtagagtctgggttcaccatgttggccaggttggtctcaatctcctgacctcgtggtctgcctgacttggcctccgaaagtgctgggatgagccaccgtgcccagcctatttagtatttctttactatcaaaataatcgtccattattaactgatttagcaaacttgggcatgcccctcggtctctttccacctttagttgtactatgttaaaaatgagaaagttatattcaggtttgtttttttcacagaggaacattgctaggtttctctgttagcattagcagggtttaatattaacagtaagtatgtccatgatgctttaaatacagaatgctatttttgagcagagtagagatgaacttctagacagtggaacttaactcattcacagagaaatgtaaatgtggtcttctcatagaatattttttctcatgggatttgtctgcttgtgttctgttatcccttcaattgtgtagctgagggtgcttatcttactgagtgagtcttactgttttttccccaggttttatagtttgttcttgcttctgaacaatcagcagttgtttgccattattgacaagaagtctagggcatagattttcttgatctgtttttcttttaatgtttgagttcaatggataagggaaacggttgtatgcattttattgcagacattctctgaaataatttttagccacaagcaaatagctctgtttctgtgagtcatcatttcttcttatatagtgctggataaagaattctattttgtagatagagatttatgacttccagaaagaaagctgcaaaaatggaagtttccaaagaatttaagatttgctataataaatgctatcatatattggtgtttgagatgcaaatgtacatatctgtgtatcatatattggaggttgattgaaaatcggagtttgagatgcaagtataggtatctgtggttgatgcagttttcctaaaacgtcatgattttcaatggcaagtaagttatttatggtcgtttttaaggataagctgttaacgtgttttttttttctttttttttcagcttccaataaaaacaggacagcagaacacacataccaaagtcagtactgagcacaacaaggaatgtctaatcaatatttccaaatacaagttttctttggttataagcggcctcactactattttaaagaatgttaacaatatggtgagtatttgggttactgtgttttggggaatttgctttcttttctttttgattaaaaagtttagaacagcatattttgaagtatggaaagtgattttctgtggactttggatataaccattaatcttattttgtttacgagcacagataaccttttaattttattttgtcaaatttttaatcagctgggttttagattcagtgagcacaagtaactgtaactttcattttaatttattatttcccttagaaacatctcctatcttttgtgaccatgtctccttttccagtatgtttcttgaattaggatttcatagagcttttgtggcctacacgaattgaccacagtaatccattacacatatttttctttagcatcttgtttgaatttacttacggttgtcccagccctaagtagatgataaaatatgatctcatagtcctaaaatgtggattgatttttttatgaagatatgtgttttttcttccttctgtaacctgtgacagattctgtagtagttaccctgttgttgaaacagtttttctcaaataccagtttcatcaaataattccactgttaaaagctcataatttctttcttcttcccattttctaaaatcgattgacgtttcctagacttcagagtactccagctgtcctccctctgtacctttgaacatataacatcttttgtctttctcaagtgatcccttcctctctctaaattcctatttaacatctccattctaagctgtttcaaactaacatactcagttcatggcaactgatctggatttttcttgattaactctgaactctctgctggtgtttagcatttatttatttatttatgaatgaataaatgaatgaatgaatgaatgacagggtctcattctgtcacccaggctggagtgcagtggcgcaatctcggcttactgtaacctcccccttcccagttcaagtgattttgctgcctcaggctccccagtagctggaattacaggcatgtgccaccatgctcggctaatttttttgtatttttagtagagacgaggtttcactattttggccaggctggtctcaaactcctgacattaggtgatccgcctgcctcggcctcccaaagtgctgagattacaggtgtgagccaccgcgcccagcctgcatttataatcccagtttgtatttgtttgtattgagttgtgaaacaacttctggttatagattgtgaagattgttcccccttccttttttttgagatggtccttaggtttattagataatattctagtatgacattgaaaagacatgaagttacctttttgccttattcccatattttagataatttttctcttgttctattttatttttaactggcatacaataattgtacatgtttatgggtacatattgatgtttcaatacatataatacatagtgatcccactagggtaattagcatatccatcatctcaatatttatcatttctttgtgttgggaatattgaatattctcttgttatttgaaactatataatgttaactgtaggccaggcatggtggctcacgcctgtaatcccagcactttgggaggccaagacgggcggatcacgaggtcaggagatcaagaccatcctgtctaacatggtgaaaccccgtctctactaaaaaaaaaaaaaaaaaaaacttagcggggtgtggcggcatgtgcctgtagtcccagctactcaggaggctgagacaggagaatggcgtgaacccgggaggcggagcttgtagtgagccaggatgcgccactgcactccagcctgggtgacagagtgagactccgtctcaaaaaaaaaaagttaactatataatgttaacatagtcattctacagtagtacagaacactaagtcttattcttcctataaagctatatttctgtatcctttaacaaatctctacccaccccgattctccctacccgacccttcttacctctagtgtcctctcttctactttttactctttttagcttccacatatgagtgagagcatgtggtgtttaactttttgttcgcatcatccttggtgtgtttccttttaagaaagttgcttacacaataccctaaacttacaaaactaataaactggaggtgtagaaaatcatttaccttctttatggaaaaaattagtattttccccccaaaagcaggaccatttataaataggtaaagagatttacggaaagacatttaacattttttgtagctcctctgttgcagtgtgtggggcacagtttagtatttgcacatatgaatatgtggctgtgttcccagttatattgaaatattttaatatttgggaccctcttttcaaaacaaaacagcattgttatattggcgttcatttagtgcttattaaataagttttcaaaaccatagtctcttgttaataaatacatatgtagtattcattttgaggatagtgagtacttaaaattcactgtggtgctatagcatgtttttgctataaaaattaagactttgatcatttcgtggcataaaagtatagttaaatccccaattcaagattctggtacaggtctatatgtgtgtctaaatcctacatatttttaaagcatgaagcaaaacagcatcttttactgttacaaggttaatggcagactctaataaatgccatttctgtttgccttagactttagtttttatgaggattaggataaaatcagaaataatatatttaagtatagtataatctgggaggtaaaatggaagactattgttgatcttttagtctttcacttttcagatgtgtgttgattggtagcagaaagtgaaactaacttttatgttctgaatatcttttctgttagagaatatttggagaagctgctgaaaaaaatttatatctctctcagttgattatattggatacactggaaaaatgtcttgctggggtaagtaaattgatcttaagtaggcaggctttgtgaatttgatcttgagaatgatcttatgtcccaaagtacagatgtggaccaagaggacagtcctatggacttttgtctgagacatataaatatgagttttgttaatatagctgacctggtgacagacaatttttcatgagaaaattttctcatcttttgtaaattaaacagatattaagtttacttataaaatgttatgtttcagccacgtatctgtctctcaggtttttaggaaaatattttatgaagagatcactatttgatttaacggatctctcagagagttgtgggagagtgcgattcagaagtccaagagtaatcttgtatttcctcctatatgaatatgattttaatattctacttttgaaatttatgtaaatgagaacttaaaaattaaacctattaaggatagatgttaccttgagaacacttgttttatgtagacacacaaatatgcgataggtatgtggaggaggagagtaccaaacaattatttctctggtttcctgtaagttgttaccacagtgtatttcaaccatgacttaatttgaactttttcaagagtatttctattgtgtaaagaaagtatttctatacatcattatccttaattcttcctggaacatggtaagagtttatataaatatataaattaaatacctctgttttaatgatctgcctaatccatgtgtattgaaattaactcatttcttatgttctctcttcctttggctcagaattcagaattttgttttgattcagaattgcttccctcttcacatatgttgcagttctctatagtgaaactagttgaaagagaccttaatatatgaggactgatagtgtggttgagaagtgttggtggaagcattggggtagggcattgaaaaaaaaattatattgacacaactgtgtatccctagggaaggctgtaagcgaaaaaatgtaagcataatatgtatatatatttttcttttgagacagagtctcactctgcggcacaggctgaagtgcagtggcaccctctcggctcattgcaacctccacttcccgggttcaagctattctcatgcctcagcctcccaagtagctgggattacaggcatgtaccaccatgctcagctattttttttgtattttcataagccatgggggttcactatgttggtcaggctagttttgaactcctatcctcaagtgatccgcccattttagcctcccaaactcctgggattacagatgtgaaccactgtgcctgccctaagcataatattttaaattttcttattgaccgttgaccatattccaaaattgtggagacagtgtttataagttttctacttaaaatcgaaggtgagctagttgttttagcatggtattttccgttaacttgtgatatgctattgttcatgtgtaaaatggagtgaaagagcaaaagagctgttacataggatgatggaactgggaagatgggcaaattttaaacttttcttgaatcagttttttccagtggtcttattactttgactgcaaattaccagtatatcagccacacccatgactgaatggtggggcgtggggtcatatattgccttgttcagtttcacagcttttctccattaacatttgtaattgagaggtaataatgaatgtattttggagaatgattaccgatattattggcctctgtttgatttaatactctttgaagatagcctaattgaaatgctaataagtgggcctagtataacttatgtaatgcataaaatgtatattatcttgccgtgctctactgttgaaaaatgtgtatgctttttcattaaatttactatttaaaaagtaatgctatttatattattgaacaattgttttatttccttcagtgattttacagatgtttcttgattcttacttttaaatcaaagtaaattgaggcagtttaagaagaacggagctcacaagtatacgtttgttatacatagttggaatatttaagtgaaagaaaaatacttaccaatatgttatgagtgcaattttgtagaatttgaggaatcttaagtatttttgttcctgtgaatatgactattatttaaaagatttaatacttcttagatttttatttgttagagttaacatctgtattgtttggttagcctataaacaagaaataggcattgtaatgtgaattcacaggtttttgtgaagtctgtttatgtactgtccctatgtttcagtgtatttgcatctgagagtgcttggattgcagttacagaattgagcgtagcatacaattgtacacatttttgttctttgccatcttgctcagtgttattaaaattcttatccgcatgtagttatcaagactgttaggtgaaatagtaatgtggaacagcatacctacaggatagcttatccattgattgtgtgttaattgtaaagtatatatttacaaagtagagatttcactgttaacaccgaagttatcaaacttggtgtcaataacaggaccacctggccttatgttctcatggtgtgatgtaatataacctatagtgaatcccctaaactgtttaacctcaatctaatcagaccattaggtttaaattttagcttacagaaaatatacaggccgggcaccatggctcacgcctggaatcccagcactttgggagatcgagacaggcggagagcttgaggtcaggaatccaagaccagcctggccaacatggcaaaaccccatatctgctaaaaatacaaaaattagccagatgtggtggcacatgtctgtagtcccagctacttgggaggctgaggcaggagaaccacttgaaaccaggaggcagaggttggagtgagccaagattgcgccactgcactccagcctgggccacagagcgagactccatctcaaaaaaaaaaaaaaaaaaaaaagaacgaaaatatacaatacagtaactagaagagcaaatcaacctatgtcactggaaaataattaaatcaaggatatggaacattctgtaaggcagctggcccacttaaagtcatgggaaataagagtggtgaatatgggccaggcgtagtggctcacgcctgtaatcccagcactttgggaggccgaggagggcggatcacttgaggtcaggagttcgagaccagcctagccaacatggcaaaaccccgtctctactaaaaatacaaaaattagctgggcatggtggcgggcgcctgtaatcccagctattagggaggctgaggcaggagaattgctttaaccctggaggtggaagttgcagtgagctgagattgcgcccttgcatagaatagtgaaactaaggaaacatcatgttgtaatcggtgaacttttttggatccttattgaataaaaatgcctatgaaagacattttgggggcagtggtgaaatttgaattcagacttggtattagatgatacaagggaattgtttatttttccttggtgtgttaattgtattgaagttacattagagaaaattcttttaagagatgccaaggcacatggggtgaagtattctatttataatttactttgaaaagatttcaaccaaaataaaattactttgagtaggtagtgtctgttttggtcagtctgcacaaaagcaagtgtgatggctcacccaggaatttacttaaatgtcaagacagatgacacaatgcactcatcaatcaatatgaattaagtcgattctgtaattgtagaactcacagcaaactggggattcccagggaagggctcgtttggtgaacaagagagcaagcaggaatgggaggactggtaaggatggcagggggattgaactttaattgtgattatggggtcagagatggaaccatcctctttattaaactatctatagacagatgtagcaaatatgatgaaacgttaacagttgttaaatctaggtggtgtgtatgtaaggtgttcattatttttgttctgtgtgtgtgtttgaaaattttcataatagaaaatgtttacaggtaaaattaaagtttagaataatgtgattatttctattttagcaaccaaaggacacaatgagattagatgaaacgatgctggtcaaacagttgctgccagaaatctgccattttcttcacacctgtcgtgaaggaaaccagcatgcagctgaacttcggaattctgcctctggggttttattttctctcagctgcaacaacttcaatgcagtctttagtcgcatttctaccaggttagtgtgtaaatccacatgggactactgaagtaatatgaatattagaagttttgttttttgtctacataaaaataaaaagttaatggaaatgaggtttttttgtttttgagacaagttcttttgcccctcacagcagctttgacctcccaggcttaggtgatcctcctacctcagcctccagagaaatgagtttgtctgggcttgcgtagaaattttatgcattaatatctttgacattttaattgcgtaatattgtgatattgatatgtgcaattaaataagagcactgttatgaatgtgaaagtctaaatttcagataaaaatatctgccgtgagcaggctttaaaaaacaatactaggtatgaacttttggtttggctttttaaacatattatccctttaaatgaaactacccaattagatggaataattaatgagagtagtcagaattcaaatactttcacaactctaccctttatcacaagattttaggttaccaaaaaacaaaacaaaaacaaaaacaaaaaaacctaagtgatgtgaaaacacaaggaggtgaataattgcaaagtagaattctccagaaagtggactacattttaaatgtatgtaaaatactgccatttattgagtatttatagcatttcctttgctgtctcatcctcacagtaaccttgatgatacttccctcattttacaggtgagcaaactaatactcaaaaaagttcaggtgatgtgccaaataatggaggacccaaaatttctaagtcaggctggcttcagaatttatattagtttcactataccagattgcttccctatctattttagccacattttgatgaaatctgttttataaaatatacttctgtttttaaagatgtatcaaaaatataatttaagcttttattgatgactcaaaatcatcctgagcattagttgtgatatgctacctacaggtggagaaattagtataggtagtgctctatgggatagaattataagtgacagtagcaagtagctgcaaattgttgttatgcacatgatttgcctttctaaggcaagtaaagtcagatgggttattaacttaattagaaactatagcacaaattatttagtgattcgtgaatcgaagactaataccgaatagagaaaaacaatcctctttgttggtgcctgcatctttggctcgtcagtgttgtacgaacagtggactttgattattcagatttactgattcctttgttgttttccagcaggtgtgaaagacaacatacatcaccatttgagaatttgtgttacggttttttgggggaattgattaacttcagagtcctgcaatctttttaatcaacaatgacatttctataattaagatcctaggcagcaatatttttcaacctcaatgcaattcttgatccaaagaaaattaaagttttatttaatggtatattattgataatcttgggtaatatttacatgatagaaaaatgttttcatgaaatcttttgagcagtaacgttttatattatgaataataatacagtggttgagtcagcaaggtaacaaacacctagagagtaggagggtggaaaattgtatttaataaaaaacgcaaacccttttcatttaggtgactgctaggccggccttactatttgaaacacctgttaaattaaaggtagaaagtggtacaaaaaaacccaaatgtcttgtagtctatcaatgcatgaactgccttatagaacacaacaaatgtgccaccttggaaaattctagaaaatttctagtcaccaaaggttttactttatgggattttgcagcattagcacatgtaaaaataagcaacttttgtttatttcctgaatctagttcactgttgccagaatagaaaccaagtgtctaaaattttattagctttcagaggacagaccactcagaaatggcatctgtgaaataacattgtttcagacaactgcattttcagttccatttagcttgtgtcagaaataggagctgatcttactgaaggatcactcacctaaaagaccattatgatggtttagtttaggttggaacatcttatgctgtcatcgtcatagtattaggtgacttaaaatatgtgtgtggcttgaatggtagttctttctaaagattgatcttatgttttatatataatagatgaatcagtatcatgaagatgtttcgtgtttgtccattctccccgtcaatgtttctcctttaagattaagatttggtttttatatttctgacctttacttttctttaggggaagataggctatagatttatttattttatgtttttgagacacagtctctctctgtcacctagtctggagtgcagtgatgtgaacatgtctcactgcagcctcgacctcctgggctcaagagatcctcccacctcagcctcttgagtagctgggactacaggcacgtgccaccatgcccggctagtttctttaatttttttgtagagacggggtcttgccatgttgcccaggcttgtcttgaacccctgggctcaagggatcctcctgccttggcctcccaaagtgttgggattacaggatgtgagctaccatgcctggctggctataaatcttaagatagctttatttttctctgggagtataccattttctgtggcttatagtatttatgtagcggagtaactgctttctccacagaattactccacaaatgcagttgatctagttgttttgtagtgagaaggtgcttcagaatatctcatttgatataccaccagaagcagaaaactcaatgactttaaaagtcatttggttctttacagtttactatttggttccatacaaatctgttcgttatggtttcttactctttttttaaaaatagttttcagtttttttatatgtctctgatcatttaaaacgtattttacgttctctttagtattgtttaatattgatttgtttgtgctgattcattcatagtgaattgtttcatctcagttttggaatccttgattgcaaagttatctttagtgtggcctgtattttctttgagaatccttgtagccttgggctgagggagtgttctagtgatggttttgcatttgcatttgccaggtgcccagttctggagctatttttttcttaatttctcagtcccagcctgtatgggcagtataaatttgaaccctaaactcttagaaggtaaacagctctaggtgacttttttcactttatccaaagtttaggcagagcagttaagcttctttgtgctggtaggtttttttctttttttctttttgtggggagtgggggcggcagggggagtgcattgttctttctagttcatgttttatgcagggcccaagttagaatcctgaattattagggtacaaggcgtttatatccagtctccatgtggatgttaagccccaagctcctaggttaaggagatcaaaaacctcactcatctttcctttgttgcagggctgggtcatgtacttgtgcacttaactctctggttttcagttttcttcttcttttctggacctatacatttaaaatatctttcagtatgcctagactttctagctgttttagtgataggttttctactgttcatttcttttgctcagactacgctttatttgatttctctgcttcggaaatgatgtttaaccttcacaaaatacctgctctctataagggtaccagactataaaagggacaaaatttttctcccatttttcacaaacaaccacaagagtcaacttttcagaagttggtattgctgatctatgatgttgtgttttctgaggagccgtactccatatttctacgctctttgcagcagctgtggaatttttagcattgaggacaacctcattcccagcttgaaatgctgagcttttcttaccctgatgataggaagagagttcatgtaagtgcttagaatagttgtactgttagctgtagtctaattaaagctaaagtgagtgaaacgagaatttgagaaggaagaataggattgattacattcttatcaactgaaggtttagtgtgatgattaataactcctttgcaaattgcactaaatgattgaaattcaagttaatacatataaattataagaccatatagtatttgtgccttttcaccatatctctattgctgcatttataaaagtttacaatttaattgtgctgcttatattttttatgtctattaatatgaataatgagtatgcctcattaggtagcatgatttaatagattagcaataccaacttttgaaaatctgagtgctgtggttgttggtgtaaaatggaagaaaagtttaatgccttttattaacatttaggctaagtgaatttcttttatcagtttaaaaatatctacatatttgttaagtgttaaatgtttctacgtttgtgataacttcatattcaacataggagaagctggggtttaaacagatattcctgtccttataagcttatgttctgtgaagtagggatattaagcaaataattacataaatacatgtacaaactgtgaaaagtgcaatgaaaaaaggcttactcggttttcaaatacaaagtaaatgtaccctgtgaatataaagtttcattcgtgtttcaaaaatctagttgataaaagtagaagttagtaaaatcaagtttacttattatagttttagtcttaattcaaattatacttttacttgtaattggaaatatgaatttttaaaactattcattgtggaaaaatggaaaaatacacatagaatagtacttcaaatccccatgcatctcttactctgctttaactgtttctggcatgctatggtttctcttcttcccttttcagtaatttaaagcaaaccccagacatcatttcacctgtaaatatttcagtatatatctctaataaatagatttttaagcatttaactataatattgtcatacctatcaagaatcataattccttaatatcatgcattgccaaatttgtgggttttttcattatctcagaaatggcttttttgttttgttcaaattaagatacaaataggatgcgtactttggaattggttgatatttctcctgagcctctgttaatcagtatcatttcttcatttcttcaccttgctctccattttttcccatgctgtttatttgttggactgcgttatttgcctttctacattctgtatttgggtttcattggattcacgttcatttggctggggggggacaagaatactttactgatgatgctatgtggttcctaatgaatcacatcaggaaacatgtcctattattgacttttaatgttatgatcagtgattggatttcgatgttatcagcattatgtattcattatacagtttcccataaatttttcctaatgtttttagtaatcactgatgatcactgcctggattccacttcattgggggctgcaaaatgaaacgttttctattctgtcattcattctttattttaaaattgtgacttctatgaaagatttttgcttcattgtgtgtttagttatcttgcaatacagtccatgtagggaatgcaggatacagacttgacttccattattcgttatcagaatgagttggtaccctaacagttgcgaaaggttacccatgaagttttttctttcaatattataacaggcttgtgtgttttaatttattgtatgtgtttccattgtagacataattcttttgatcctcagattatcccatttttgacagttgagatgcctaaagtgcatacctgtgtgatatttgacatggttctgatagttgttgatagtttcctgttttcaagcccaaggtgacctgccctcaccttgtatatctcttgcccccatcctggaattaactaattttcccaaagaaccctggccgaaagtcggcaatatttagacacctcaatcttaaggataaggatgctacgatgctacgtttactgaattatcatggtttcttttatcatatcccttgtttgttatgttcctttaggtttttataagaaatatttattgccttatttttatatatgtctttactcttatgaactcatctttgggggaagaatctgttgaattcagaatttagggatacccgaagactttttttgtttttgttttttttaagagatagggcccactctgttactcaggctgaagtacagtggtgtgatcacagctcattgcagcttcaaacttctaggctcaagagatcctcctcccttagcctcctgagtagctgggcctataggtgtgtgccatcatgcccagctaatttttgtattttttttagagatgatgtcttgctatgttgcccaggctggtcttgaactcctggcctcaagtggtcctcctgccttggcctcctgaagtgctgggattacaggtgtgagataccacacctgtcccctaatacttaatttgataagttaattttggtttttactttttaggttacaggaattaactgtttgttcagaagacaatgttgatgttcatgatatagaattgttacagtatatcaatgtggattgtgcaaaattaaaacgactcctgaagggtaagtttaaatgtataatatatctgaaaaaaatcactgggtcaaaaactagtatcatgaatgtactaattatattaattgtgctgaactagaacaccaaactggattttataatgacatttccttgtgaaataaccagtaatacaaatgggtaattatttttcaatctttgaaaataatgcagtagagaaaatgagcattttaaatcttggcaatggaaagttttgcttaactacaatttttgttttcaatacagagaatgcaagggtgctattatttcatttttctggaatttgatctctcaagggtggctataggttatagaagctatctgtttagctattgtagcactttacaaagattgtctgtagtaggatatcaaagttttattgcagaatggaacgaggagattgtgatgttatggtgagaggatgaattgagccagagatttcatttctgacatttctgttttcagctctctactgactgactttatagcattacaaagtcccttaaccttccattgccggttttgtctccttgtagaacatgtcagtagtagttccacatggggatattataacacctaatatgtgactttaaagcttgggaagtactttacatgattatgtggattgaaataaacgatcagaaggaattgagatatgttctgtagtaagcagtgatgtgttaatgtaaatcagataccaatgagtattcataaactgagtatgatctgaaggaattgagataaattctgtggtaagcagtgatgtattcatgtaaatcagatatcaatgaatattcataaactgagtatgaatatctaaatttcattttacaaaaaaatgttttttagtttttggcattattagaccctggctaatttagatatgaaaccgtatacagttcacacatatttttatttgtaacttaaggaattgtcaaacaataatatttttaatatctgacctaaaacagattgaattatattagcttcagaaacatcagttctgcaatgtagttttcaaaatacgtgtttttgttttcttaatatttcctttaaactcaataactatctcaccagagatgtaaaaaggcaatacctatataaaggaataatataaagctgtgttctattcatattacccttgttcataatttatgattttaggtcattaccattgtgaaaccaagcaacaattaattcagtaactttaataaaggaaaatataggggtgattttagctgttatgccaagatacaaacatgtggacagcaattattttagattataataaaccaccattgaattaatagttgagatttgcaagattttgatatctattattaagcgttgagcagttgagaaactgaatggtaaaatttagagatctctatgaattaaagttaagaagtattagtgggattttatgatttttcataactattcagtgatgttttggaaacaagtctagtccaggttgcctgtgaatagctgtttaaaacaatagaaatgttcaatccgtaataattaactgaaatgtctcttctgtccaaataagagaaactaattgaatgtgtggataaatgactttcttttatactgaagtaactttcccatcgaatgcggctccctcatgaacataaatttagagtatatgctgataaatatataaagtataaaaccgatattaaataggccagcaaaatatggctcttggtgacagtggtaaaaggaatgcaccctttcagtaatgagtagtaaaggtagtaatgtgttttaaatacaactcaacaagcctttgttgagaaactatgtataagaagccatgctaagtgctgggattacaaaaattaataaaatatggaatctgtccctaaggagctcatggcatggtttatgagacaagtgatgtcattatcaagttatttgcagaaaaaaactatgataaactcaaatagggtgagtgtaaagtgagagaggaagtatatatttgtttgaggggatgagagatgagcaagatgtgaaggtacaagaataggtcagatcattttaataaaaatatggccaggcctggtggctcacacatgtaatccccacactttggggaagccgaggcaggaggattgcttgagccagggcaacatagagagacccccatatatacaaaaaaaaattagctgggtgtgctgacacgcacctgtagtcccagctacttgggaggctgaggtgggaggatcacttgagcccaggaagaggttgaggttgcagtaagctgtgattgtgccactgcattccagcctgggtaacagagtgagatcctgtctctgtctgtctctctgtctctctgtctctctctctctctctctctttctctctttctctcgatatacctatctgtatatagatatatcaatcgatatgtgtatatccagatctgtctatagatatatctgtatcttgatagatatatcgagagagagagagaaacatttgttatattttcagtctgcaccgggccttgcgctatgcagtttgcatgccttttctcatcaattcttacaataaccctgtgacgcaatactagtattaatattatcatctcttgtgtagatgaggaaactgaggcctcagtaaattttcaaagtcacagagctagtaattgttcagtaaagattgagttcacatctgctcgtctctagaacctagatacttgactgctgcactgttgtgcttatgagttacgaagctttattttagtggccctgggaagtgatagaaaggctttgaggtagagaataccttaatcagtattttattttagatatacccctttgcttgaaatttgcaggatggcttggtagagggttacctgaacttctgggacttggttatgcagtaatataagtgaaaaataatgagagttgtggagatccagatgatggattggggtagggtaaggatggggaccagtttgataggtatttaaagaagtggaggctgggcgcagtggctcacacctgtaatcccagcactttgttaggctaaggtgggcggatcactgaggttaggagttcgagaccagcctggccaacatggggaaactccgtctccattaaaaatacaaaaaatgggctgggcgcggtggctcacgcctgtaatcccagcactttgggaggctgaggcaggtggatcacgaggtcaggagaccatcctggctaacacggtgaaacactgtctctactagaaatacaaaaaattagccagtcgtagtggtgggcgcctgtagtcccagcttcttgggaggctgaggcaggagaatggcatgaacccgggaggcagagcttgcagtgagccgagattgtgccactgcactccagcctgggcaacagagtgatactccgtctctaaataaataaataaaataaaataaaaatacaaaaaattagccgggtgtggtggcacgtgcccataatcccagctactcgggtggccgaggcacagcagaatcgcttgagcctgggagatggaggttgtagtgagccgagatcacgccattgcactccagcttggacaacaagaccgaaactccatctaaaaaaaaaaaaaaagaaatggaatacatagcatttgatagtcaatttagatatatgaggttagagagatatcaccaaatattacagaataagctggttagagcagaaaagggaaggaaaggttgatggcagaagagagggtttgaccaggaaaatgataaattcagttttagatcttctgagtttgaggtatcagtaggatgtccaacaagaaacttgtagaactgaaagatactttggctttgagagtagattatggtatataacacatttaagatgtcataaaggtaaagttgttgctaaagagcactgtgaagagtaatgtcattatttggaaatcagtggagggtgagagcaaagagaattcaaaggggtacttttaaaaactgatttggagagttacttatttgcaagtccagaaaaaagactcatctctctcttagacacttacatagatgtaataaaaacctttatcccttcattaaaagtcaacaggagaagttctttgccgagggaccattgccagtaaaatcgcttatagacaggtcattttttccaaacataaatctttttctagatgtggacaataaacttaaagaagaagaaattaaaatacccaatatatttatatggagaaatgtttactgttacttgcgttaaaatgcagtctactattttgaacactccaattagcaaaataaagaaaatgaacatacttttatgatgacaaagataggatgaaggcactttcgtatgctgcttggtgatagcagcatttggcccaaccctagtgaaaggcagcttggtaatctttatcaagggccctaaaaatattcatctctttgactggacacttctagagattccttatcttaaataagcagtgatgtgggaaaagatgttgatatgaaaatatttgttaatgttatttataatagtgaaataacagaaataacctcagtgttaaaactggaaaacattaaataaccagtcacttaatacagtgacttaaatattatgaggggcatcaaagcatactgaaaagaccttggttttaaagcccaattcaatcatttattagatctgtaaccttagacacacagtttgttcatctgtaatactctgaaaacattaagattcaaaaagaattaagtgtatcatactaaaaatacatgatatgttttaatagtttgtgtaatagttactattgcatatagagccatcaaaaataggccaggcacagtggctcacacctgtaatcccagcactttgggaggcctacgtgggcggatcatgaggtcaggagttcgagaccagcctgacgaacatggtgaaaccccatctctactaaaaatacaaaaattagctgggtgtagtggcgcacgcctgtaatcccagctactggggaggctgaagcaggagaatcgcttgaacctgggagacggaggttgcgtgagccaaaattgtgccattgcactccagcctgagcgacagagcaagactccatctcaaaaaaaaaaaaaaaaaaaaaaaaagagtttttactgatacagaaataattagggatactatggaaaagaacaggtttgatacagcttatatgatctcagttatgttaaatatatttgttttctacatgcataggaaaagtggtagaagtaaaaccaccagatgttaactgtgattgtctctgaatgatagaatcattgatggttttaaaaatttcccataaacacctgtgcttttgctttttttttttttttttttttttggacagagtcttgctctgtcgctcaggctggcatgcagtgacatgattatagtacactgtagccttgaaatcctgggctcaagctatcttcccactcctgctttcgaaagtgctgagattataggcgtgagccatcgggcctggccctgtatatgttttccaaattttttaattatactttaagttctggggtacatgtgtagaacatgcaggtttgttacataggtgtccatgtgccatggtggtttgctgcacccatcaacgcatcatctaccttaggtatttttcctaatgctatcccttacctcagcccccaccccccgacaggcaccgatgcgtgatggtcctctccctgtgtacatgtgttcttatggttcatctcccacttatgagtgagaacatgtggtgtttggttttctgttcttgtgtttgctgaaaatgatggtttccagcttcatccatgtccctgcaaaggacgggaacttatccttttctatgtcagcatagtattctgtggtgtatatgtgccacattttctttatccagtctatcattgatgggcatttggattggttccaagtctttgctgttgtgaacagtgctgcagtaaacatacgtgtgcatgtgtctttatagcagaatgatttgtaatcctttgggtatatacccagtaatgggatggctgggtcaaatggtatttctagttctagatccttgaggaatcgccacactgtcttccacaatggttgaactaatttacactcccaccaacagtgtaaaagtgttcctatttctccacattctctccagcatcttttctttcctgactttttaatgatcgccattcttactggcgtgagatggtatctcattgtggttttgatttgcatttctgtaatgaccagtgataatgagcttttctttatatgtttgttgtcttcttttgagaagtgtctgttcatatccttcatctactttttaatggggttgtttgtgtttttcttgtaaatttaagttctttgtaggttctggttattagccctttgtcagatgggtagattgcaaaaattttctcccattctgtaggttgcctgttcactccgatggtagtttcttttgctatgcagaagctctttagtttaattagatcccatttgtcaattttggcatttgttgtcattgcttttggtgtttcagtcatgaagtctttccccatgcctatgtcctgaatggtattgcctaggtttctttctagggtttttatggttttaggtcttatgtttaagtctttaatctatcttgagttaattattgtataaggtgtaaggaaagggtccagtttcagttttctgcatatggctagccagttttgccagtaccatttattaaatagggaatcctttccccattgcttgtttttgtcaggtttgtcaaagatcagatggttgtagatgtgtggtgttatttctgaggcctctgttctgttccattggtctatgtatctgttttggtaccagtaccatgctgttttggttactgtagccttgtatagtttgaagtcaggtagtgtgattcctccagctttgttctttttgcttaggattgtcgtggttatgcgggctcttttctggtttcatatgaaatttaaagtagttttttctaattctgtgaagaaagtcagtggtagtttgatggggatagcattgaatctataaattgctttgggcagtacggccattttcacgatattgattcttcctatcgatgagcatggaatgtttttccgtttgtttgtgtcctctctggctggcatctggcaggtgcccctctgggacaaagcttccagaggtaggaacacgcagcaatctttgttgttccgcagcctctgctggtgatactctggcaaacagggtctggagtggacctccagcaaactccagcagacctgcagcagagggttctgcctgttagaaggaaaactaagaaaggaatagtatcatcatcaacatcaaagaccaaaggtagataaatccacaaaaatgggaagaaaccagtgcaaaaaggctgaaaaaaaaacgagcacgcctcttctcctccaaaggatcacaactccttaccagcaaaggaacgaaactggacaaagaatgagtttgacaaattgacagaagtaggcttcagaagatgggtaataacaaactcctccaagctaaaagagcatgttctaacccaatgcaaggaagctaagaacctggaaaaaaggttagacgaattgctgactagaataaccatcttagagaagaacataaatgacctgatggagctgaaaaatacagcatgagaacttcgtgaagcatacacaagtatcaatagccaaatcaatcaagcagaagaaaggatatcagagattgaagatcaactcaatgaaataaagcgagaagacaagattagagaaaaaagagtgaaaagaaatgaacaaagcctccaagaaatatgggactatgtgaaaagaccaaatctacatttggttagtgtacctgaaagtgatggggaggatggaaaaagttggaaaacactcttcaggatattagcaggagaacttccccaacctagcaaggcaggccaacattcaaattcaggaaatacagagaacactacaaagataatcctcgagaagagcaaccccaagacatataatcgtcagattcaccaaggttgaaatgaaggaaaaaatattaagggcagccagagagaaaggtcgggttacccacaaagggaagcccatcagactgacagcagatctctaggcagaaaccctacaagccagaatagagtgggggccaatattcaacattcttaaagaaaagaattttcatcacagaatttcatatccaggcaaactaagcttcataagcgaaggagaaataaaatactttacagacaagcaaatgctgagagattttgtcaccaccaggcctgccttacaagagctcctgaaggaagcactaagcatggaaaggaacaactggtaccaaccactgcaaaaacataacaaattgtaaagaccatctatgctgtgaagaaactgcatcaactaatgggctaaataaccagctagcatcataataacaaattcacacataacactattaaccttaaatgtaaacgggctaaatgccccaattaaaagacacagactggcaaattggataaagagtcaagacccatcactgtgctgtattcaggagacccatctcacatgcaaagttacacataggctcaaaataaagggttggaggaagatttaccaagcaaatggaaagcaaaaaaaagtagggttgcaatcctagtctctgataaaacagactttaaaccaacaaaaaagatcaaaagagtcaaagaagggtattacataatggtaaagagatcagtgcaacaacaagagctaactaccctaaatatatatgcacccaatacaggaacacccagattcataaagcaagtccttagagacctacaaagagacttagactcccacacaataataatgggagactttaacaccccactgtcaacattagacagatcaacgagacagaaagttaacaaggatatccaggagttgaactcagccctgcaccaagtggacctaatagacatctgcagaactctccaccccaaatcaacagaatgtatattcttctcagcaccacattgcacttattccaaaattgaccacataattggaatacaacactcctcagcaaatgccaaagaatggaaatcataacaaagactctcagaccacagtgcaatcaaactagaactcaggattaaggaactcactctaaaccacacaactacatggaaactgaacaacctgctcctgaatgactactgggaagataacaaaatgaaggcagaaataaagatgttctttgaaaccaatgagaaaaatacacaacgtaccaaaacctctgggatacatttatagcagtgtgtagagggaaatttatagcactaaatgcccacaagataaagcaggaaagatctaaaattgacaccctaacatcacaattaaaagaactagagaagcaagagcaaacaaattcaaaagctagcagaggacaagaaataactaagatcagagcagaactgaaggagatagagacacgaaaaacctttcaaaaaatcaatgagtctcctgacctcgtgatccgccgccttggcctcagtgaaaccccatctctactaaaaatacaaaaaaattagccgggcatggtggcaggcacctgtagtcccagctactcgggagcctgaggcaggagaatggcgtgcacccgggaggcagagcttgcagtgagccaggatcgtgcaactgcactccaacctgggcgacagagcaagactctgtttaaaaaaaaaaaaaaatcaatgaatccaggagctggttttttgaaaagatcaacaaaataaatagaccactagccagactcataaagaagaaagagaggagaatcaaatagacgcaataaaaaatgataaaagggatatcaccaccgatcccacagaaatacaaactaccatcagagaatactataaacacctctgtgcaaataaactagaaaatctagcagtaatggataaattcctggacacatacaccctcccaagactaaaccaggaagaagtcgaatccctgaatagaccaataacaagttctgaaattgaggcaataattaatagcctaccaaccaaaaaaagtccaggaccagatggattcacagccagattcagctagaggaggagctggtaccattccttctgaaactatttcaaacaatagaaaaagagtgaatcctccctaactcattttatgaggccagcatcatggtcataccaaaacctggcagagacacaacaacaagagaaaattttaggctgatatccctgatgaacatcgatgcaaaaatcctcaataaaataatggcaaactgaatccaacaagcacatcaaaaagcttgtccaccatgatcaagttggcttcatccctgggatgcaaggctggtttcaacatatgcaaatcaatgaaagtaatccatcacgtaaacagaaccaatgacaaaaaccacatgattatctcaatagatacagaaaaggcctttgatgaaattcaacagcccttcatgccaaagactctgaataaactagggattgatcaaacatatctcaaaataataagagctatttatgacaaacccacagccaatatcatactgaatgggcaaaaactggaaggattccctttgaaaactggcacaagacaaggatgccctctctcaccactcctattcaaactaatattggaagttctggccagggcaatcaggcaagagaaagaaataaagggtattcggttaggaaaagagaaagtcaaattgcctctgtttgcagatgacatggttgtatgtttagaaaaccccatcgtctcagcccaaaatctccttaagctgataagcaacttcagcaaagtctcaggatacaaaatcaatgtgcaaaaatcacaagcattcctatacaccaataacagacaaacagagagccaaatcatgagtgaactcccattcacaactgctacaaagagaataaaatacctaggaatccaacttacaagggatgtgaaggacctcttcaaggagaactacaaaccactgctctaggaaataagagaggacacaaatggaaaacaattccatgctcatggataggaggaaccaatatcctgtatgtgttttatacttttttttgaaaaagcaagttattaaaagaaaaagctcacaatcattgatgtccaaggcatatttgctgtttatggaatttttctttcctagcagacaactatcgagttttgggtttatgttaggtgtctttacctttcattgcttacagataatattggagcaaaagtaatacgtaaatggaaagttattttgctctgagttgtatttgtgttaacttattctagagttaatttttaaaaattgtgttttttccagaaacagcatttaaatttaaagccctaaagaaggttgcgcagttagcagttataaatagcctggaaaaggtaagttacaacctctctggtattaaaattttgtttttgatgtaaaatttgctgttgttagcatcctgaatcaaaaagttatgacttgagtgatagtttcacattcattttcaggaagaatacattgtaatattattatgaaggaagttagaagtttgtgacattttatttactgtattacaaaaaatcactgtaaagacatgtggttctttatttataggcattttggaactgggtagaaaattatccagatgaatttacaaaactgtaccagatcccacagactgatatggctggtaaggatacgattgattttttttttttttttgtcttttaaatgcctacttgtgacataaaaacctatcatcgttttccaagttatttttgttataaaggtgcttttacatcttctattgtcaactggtgtcaaataggaaatactgtttttctcttacatttctaaattaggcccaaccctcttcctttccttggagcaaacaaagtagtttgaaatgaaggtcagatctttagagctgtgataggatggggtgtttggctctttgttgtagagaagcatgtgctctgaagctttattttgtatttagggagatgtgtataaagtagtaatattctcacctataatgtaagacacaactgcaaggcagagaatacagactcctggagaactttggtaattctttttgggaagctgttcagtctttgttgcttgggtacatcacactttgcataaggcccttcacagtgagactgaatacatgatcatccattctaaaatgtgagcttttccaggatagatcaagatagctcttctaacacatagacagtattacattgcttgtctacttaccagaatgcatttgtgtagttgcttaaatgaagttccatgtttatcttttaaaaatgttgcccttgggtttttacatagtgtcagcttttactttaatgccagggattttgttcctatctaataatgtcatttaatatatttttcatgcagaatgtgcagaaaagctatttgacttggtggatggttttgctgaaagcaccaaacgtaaagcagcagtttggccactacaaatcattctccttatcttgtgtccagaaataatccaggatatatccaaagacgtggttgatgaaaacaacatgaataaggtaaggagggcaaaattatttccattatatctagatgtgaagcagtttattttactcaaggtgtgtattactttaggcttattatttaagcaaagtatttcagggaaccatttaaatgatcattttaggtttctttgtttgatggacttagaagagacatactcatacataattttatttggcagagggaaaataataccaggcaatgaacaaagatttaaaataatcccttagtttcattcttttgtctgagaagactaaacgatacctctgttattattaaacgtagtttctctaatattcactacaaggattgccctacttgagttcatcacttttatagtgtgttatttgcatgtacttagggtatgtgtccatatagtgctactgaaattatctagtaactcattttaagtattttagaacagttttcaaagaattttgccaggaaggtaaggctctcgcatataccatctatagtgaaattggcaccatgacaactggtaattctaggaggctcttaaaatttttttaaatatcacctaggtgattgaaaaaaaaaagaactgagtattaatcctagggttttactgaaatttcaatatgcagtttgttttgcaaatattttttttttcattttttgctgcttttggagaaatactcttagctggctgaacatgagatggtttccttcatggtttgcctgtagatggagatgttcagaatcagctgaatgatttattactttgtagaagtattggaccgggaatttatacattaaagggtaaataaatgaaccaggtaatccttgagagtctgtgattgcgtgttactccacttaggtgtatatctcaacttttccattatgaggacaccatttttcatggtagattgttttggagcccttcaaaatagtaggtttgatgataaatactgagtgtcaacttgattggattgaaggatacaaagtattgatcctgggtgtatctgtgaagttgttgccaaaggagattaacatttgagtcagtgggctgggaaaggcagacccacccttaatctgggtggtgcaccatctaatcagctgccagcatggctggagtataagcaggcagaaaaatgtgaaaagagagacgggcctagcctcccagcctacatctttctcctgtgttggatgcttcctgccctcgaacatcagactccaagttctttagttttggaacttggactggctcttcttgcctcttagcctgcagacggcctattgtgggaccttgtgatcgtgctagttaatagttaatatcccctttatataaatattctattacttctgtccctctagagaaccctaatagagattttggtacaaggagtgtggttctagaggaacggagtattaaggatggagtttcttagtttgtttgggggtttctggagtttgctgcttaatatgattagaccctaaaatattaaggactctacttctaatattgtggagaacactgatagtcgttgctgtgaactgtttagagagtttgcaaaataaatgcatttgacactcctgattcaccgctaatgagaggcaaggagtttagtgaccctatacataataatacctttgaccatatatggagaaccaaggaacataatgaagctggttggttgctcctaaattcagtggacaaagtggtgaaagaaaatgatgggccgggcgcggtggctcacgcctgtaatcccagcactttgggaggccgaggcgggcggatcacgaggtcaggagatcgagaccatcctggctaacacggtgaaaccctgtctctactaaaaatacaaaaaattagccgggcgaggtggcgggcgcctgtagtcccagctactccggaggctgaggcaggagaatggcgtgaaccccagggggcggagcctgcagtgagccgagattgcgccactgcactccagcctgggcgacagcgagactccgtctcaaaaaaaaaaaataaaaaaaaaaaataaaaaaataaaatagaaaatgatgagctcagggattctgtctcctgtcttcagaagcagatactgagcctcaaatctgctaagattgacctgagtgagacccttatctcctgtagaaaaagagctgaaattgtgaaaaaacaaacacaaactcttatcatgcaagtggctgacctgcaacaaaaggtgcatgtacagcctaaccaggtgtctactgttaaagtgtgggcattgattggaaaagaatgggaccctgcaacttggaaagggcatgtgtgggaggaccctgatgaagctggggactctgagtttgtaaactctgatgaaccttttttgccagaagaaacagcttccccatccccagtagtggcaacatcccctccctgagccatgctgccatcagcctttccacttttgtctgaagagataaaccctgcgctgcctgaggcaacaggaatggcctcccctgaggcagttgccaggcaagataatgttgattctcctcagaagccacccccaacacccctgtttgcttctagacctataaccagactaaagtcctagcaggtccctagaggtgaggctgagagtgtgacccatgaggaggtgcgctacactcgtaaagaactgcttgagttttctaatttatataaacaaatcttacttggagagaccttggtcatgtttcacttccacaacatatgacactggtctattacattaatgatattatgctgattggattctgtgagcaagaagtagcaaacgcactggacttattggtgagacgtttgggtgccagaggatgggaaataaatccgagtaaaacttagggaccttctacctcagtaaaatttctagggcttcaggggtgtggggcctgtcaagatattctttctaaggtgaagaatattgctgcatttggcccctcctacaaaaaagaaagaggcacaatgcctagtgggcctacttggattttggaggcaccattcctcatttaggtgtgttactctggcccatttatccagtgacccaaagaactgccagttttgagtggggtccagaacaggagaaggctctgcaacaggtccaggctgctgtgcaagctgctctgccacttgggccatatgacccaacagatccaatggtgcttgaagtgtcagtggcagataaggatgctgtttcgagcctttggcaggcccccataggtaaatcacagcggaggcctctaggattttggagcaaggccctgccatcttctgcagataactactctccttttgagatacagctcttgacctgttactgggctttggtggaaacggaatgtttaactgtgggtcttcaagtcaccttgtgacctgaactgcctatctatgaactgggtgtgttctgacccatctagccgtaaagtgggtcgtgcacagcagcattccatcatcaagtggaagtggtacatacacgatcgggctcaagcaggtcctgaaggcacaagtaagttacatgaggaagtggctcaaatgcccatggtctccactcatgccaccgtaccttctctctccccacctatactgatagcctcatagggagttccctatgatcagttggcagaggaagagaagactagggcctggttcgcagatggttctgcacaatatgcaggcaccacctgaaagtggacagctgcagcactacagcccctttctaggacatccctgaagcatagtggtgaaggggaatcttcccagtgggcagaactttgagcagtgcacgtggttgtgtactttgcgtggaaggagaaatggccagatgtgcgattatatactgattcatgggctggagccagtggtttggctggatggtcagggacttggaagaagcatgattggaaaattggtgacaaagagatttgaggaagaggtatgtggatagacctctctgagtggttaaaaactgtgatgtttgtatctcatgtgagtgctcaccaacaggtgacctcagcagagaaggattttaataatcaagtggatagcgtgacctgttctgtggatgccacttagcctctttccccagctacccctctcctcgcccaatgggcccatgaacaaagtggccatggtggcagggatggaagttatgcatgggcttagcaacgtggacttcactcaccaaggctgacttggctatggccactgctgagtgtccaatttgccagcagcagagaccaacactgagcccttgatatgacatcattcctcagggtgatcagccagctaccttgttgattatattggacctcttccatcacggaaagggcagagatttgtcctcactggaatagacacttactcctgatatgggtttgcctatcctgtatgcaatgcttctgccaagattaccatgcatgggctcaccaaaggccttacccaccatcatggtattccacacagcattgcctctgaccaaggcactcactttacagctaaagaagtgtgccagtgggctcatgctcatggaattcactgtttttgtttgtttgttttttgagatggagtgttgctctgttgccaggctggagtgcagtggcgcgatctcggctcactgcaacctctgcctcccaggttcaagcgattctcctgcctcagccttccgagtacctgggactataggtgtgcgccaccacgcccagctaatttttgtatttttagtagtgatggggtttcaccatgttggccaggatggtctcaatctcttgaccttgtatctgcccccctcggcctcccaaagtctaggattacaggcatgagccaatgtgcctggccacactggtcttaaccatgttcccaaccatcctgaagcagctggattggtagaacagtggaatggccttttgaagtcacaattacaatgccaactagaagacagtactttgcagggctggagcaaagttttccagaaggctgtgtatgctctgaatcagtgtccaatatatggtactgtttctcccatagccaggattcccgggtccaggaatcactcaccatcacccctagtgatccactagaaaatttttcttcccgttcttgagacattatgttctgctggcctagaggtcttagttccagagggaggaacgctgccaccaggagacacaacaacgattccattaaactggaagttaagattgccacctggacacactttgggctcctcctacctttaagtcaacaggctaagaagggagttacagtgttggctggggtgattgaccctgactatcaagatgaaatcagtctactactccatagcggaggtaaagaagagtatgcatggagatccattagggcgtcttttagtattaccatgtattgccatgccctgtgattaaggtaaatgggaaactacaacagccccatccaggcaggactacaaatgacccagacccttcaggaatgaaggtttgggtcactctaccaggaaaaaaaccaccacctgctgaggtgcttgctgaaggcaaagggaatacagaatggctagtagaagaaggtagtcatcaataccagctacgactgcatgaccagctgcagaaacaactgtaattgtcatgagtatttcctcctccttttgttaaaaacatgtttgtgcatgtatacacctgtactaagaaaatatcttcattttatttcctttttcttttatcatatgacttaagatttattgacttcacatcagcattttaagtattgttaacttttagtatttgggttgggataggtgtgtttctggttgtacgaaggataattgtattatgttaggcataattatgactttattgtctttatttaaagattatgtatgatctcaggagatatgtatgggttcaagttgacaaggggtggacttgtgatggttaatactaagtgtcaacttgattggattgaaggatacaaagtattgatcctgggtgtgcctgtgagggtgttgccaaaggagattgacatttgagtcagtgggctgggaaaggcagacccacccttaatctggctggctaccatctaatcagctgccagtgtggctagaatataagcaggcagaaaaatgtgaaaaagagagatgggcctagcctcccagcctccatcttcctcctgtgctggttgcttcctgccctccagcgtcggtcttcaagttcttcagttttggaacttggactggctctccttgctcctcaccctgcagacagcctattgtgggacctcgtgatcgtgtaagttaatgcttaataaactcccctttgtataagtatctattcccttaattctgtccctctagagaaccctgactaatacagtagggtgttttttgttgttgttgtttattggaaaaatagaaataaataaataagctatagattcagtagtactcgagtgaatttacgttttaataatcacaactgtagctttctaagtgtttactggttatttgtgtatcttcagggaattgctgatttttccattgaattgtttgtcttttgttgatttgtaagggtatatgtgtacatttttacttggtttcatttttaaactttatgagttctttttactatatagatatttaaaatttgcatgtagtcacctcagccttgttcctttttgtctcctagcttttttggtcagatctctcttcccagaagatattattcattttattgagatataattcacatatcataaaatttacgtttttgaagtgtaaaattcagcgattttagtacattaacaaagttgtacaatcatcaccattgtttctgtgcagaacattttcatcttcccaaaaagaaacccgttagtaatcactccctgttcctctcgcctcactcgcagcccttggcaaccagtaatctagttttttgtctatagatttacttaattctaaactagacatttcatacaaatggaatcattcagcatgttatgtttttgtctggcaggtgccaagatttttgaagtatgctttttaatttttttctggtattttctagatttaaaagtttagatttttaaatctttctggattaaaaagaaaagtattttttttttttttttttttgagacggtgtttcactcttgttgcccaggctggagtgcaatggcacaatctccgcttagtgcaacccccgcctctcgggttcaagcgattctcctgcctcagcctcctgagtagctggaattacaggcatgcgccaccacgcccggctaattttgtagttttagtagagatggagtttctccatgctggtcaggctggtctcgaactcctgacctcaggtgatctgcctgcctcgggcctcccaaagtgctgggattacaggcatgagccattgcgcctggctaaaaaatgtatttttaaaaatgtattacaaaaaaaaaaaaaaaaaaaagctggccatggtggcaggctcctgtgatcccagctactctggaggctgagccggggagaattgcttgaacctgggaggtggaggttgccatgagctgagatcatgccactgcactccagcctgggcgacagagcgagattccatctcaaaaaacaaaaaaacaaaaaaaataaaatagtattctcacccttttctactcacattccttctgagctggttagtgttattggctggtatgtatccttccagtcacatctatttacccatatattcaaatgcaaaatatacatacgtagggtggtggtggttgtattttaaaatgaaattattttatgcacattactctgcatcgttgtttatctaagaaaatattttagctgttcctcaaaatagttgatagagatctgacacattcctttcagtattaggtaacattctgttacactaatgagcctcatttactcagccatttcactgaatgggtggatattcagatgttttcagttttttgacacttagctaagccttaagtaaatatcttgttcatatatccttgttaactgatgctcttaattctatagactagaatctaaaaactaggggttcctgtgtcaagaacatttgcatttaaaatttgtaatagttattactagatttacattccccaatagttgcagcaggtcagagtttcatccccactgaattgcctattttcctgcatttttgtcaggattagctgttgttaaatctttaaaattttgccacactaataaggtgagatagtatctcatctcaggtattcttaccttctctttcagaggtaaactgtgtgatgtgatggatatgttattaccttgattgtggtactcattttagaatgtataagtttatcagaacatcatgttgtacaccttaaatatatacaatttttatttttcaatcgtacctcaataaagctgaaaaaatgtcattcagaaaggaagcaaacagtagatactagcattaaaaatatgttgtaaattttcaagcatagaatgataacataaggttaggaacaagaatatgtgtatagatttaaatatttatctctgtgaatattaatccatagatacaaatgttgaaggcaagttacaatcttgaagaaaatgaaaattatgttgtgtacctataatatgaaaataaaaaatcacacaaaggcatataccttcactcaaggatgtatactcgagtatacatattatttataatagcgcaaatttgaaaacagcccaaatgtccctcagctggtgaatgaataaaccagtggtgatgccttggaactgtggaatactattcagcaataaaaaggaactactgactcggcaacatgtgtaaatctcaaaaatattatgctaagtgaaagaagccagggtcaagagatgacatactatatgatttcttaaaacttccagagaagacaaaattcaggacagaaagcagatcagtggatgccaggagtgagagttaggggaggaaatttattgcaaaggagcagtaggggattgattgtggtgatgtttgaaatgttctatgtcatgatcgtggttgtagttacatgactattctgaaagttcatatttaataagtgatataaaagaaaaaagtattaatggcttaaacattaattttccaaatgagagcactaattaaaattctcaagtgttgagaacaaagatagtatctcattgtaatttttattctttttaaggttagtgaggtttgaaaacagttcatatgtttctttgccatttgcatgttttcttttgcaggtgcctgttgacttcctttacctattattctgttatgttgcttccagttccttatgaattcgcggaactttttgtatattcagagcagtaatcctacatttttagtctgtaaatgtttttccagtcacctgtttcttttgactatagtatctttttttaaaaagaaatatttgaaatgtacaaagaatgtaacagtttcccatactgctattaacatttttatattttgctcatcttttgagaaatttatatatgtgtccacgaaaagagtcaaactctataaaatattttaagagatttattctgaaccaaatacgagtgaccatggcccgtgacacagccatcaggagttcctgagaacatgtgcccaaagtggttggggtacagcttggtttgatatattttaggaaggcatgaaacatcaatcagatacatttaagaaatacattggtttggtttagaaaggcgcgacaactcaaagtgggggcttccaggccataagtaaatttagacgttgtctggttgacggttgagtttgtctgaagacttgggattaatggaaaggaatgtccaggttaagataaaggattgtggagaccagattttgttgtgcagaggaatctctcagcagacttcagagagagagaaggttgtaaaatgtttcttattagacctaaaagagtgcctggctcttagtcgattaatctcctggatctggaaaggaaagaaggaaaacaaagggaaaaggggattctctatagaatgtggatgttttttccccacaggagactttgcacggcaaatttcaaggtatggcaaggaaatatattttggggctaaatattttttccttgtctcataatgttatgccagagtcagattgaaaagtaagtcacgatatatagcgtcaaataaaacccatctgatgagaatttatggtttgtagggcatgacttcctagaccccttaggtaggagtttgggcaagttaaaaaatcagagctaagtcctcacatggcttttaaaaattgtgaataagtaatacttccataaattctgatttaattacgaatcccactaatttcttttttttctttcccagggacagccactgcaaagggttaaatgtatattcttccagtctagcttttatatttttatgaggatggggagatagacagataggtatatagttcagtgtttctcaaagtgtggtctttagaccagcagcatcagcgtcacctggaaatttgtgagaaatgccagttcttagtttctaactaaatacttagtttctcactaaaaacagccatttttattaagtccttcaggtgattgtgatgcacattgaagtttgagaaccattgttcatctaggtcattgtctttaactgctgtatggtgttccctaaattgaatataccattttttaaaaaagagactaagtcttgctattatgttgcccaggctggtctcaaacttctgggcttatgcgatcttcttccacctcagccttcagatagctgcaactataagcatgcaccaccgcacccagcttgaatgtaccatattttaaattccatattgtcaagcatttaagttacttttctttaaaaaattaacgttattgcaaaggaaacaattggcagagtgaaaagacaacctacaggatgggagaaaatatttgcaaagtatgtatccagcagaggattaatatccagaatatacaaggaactctgatatctcaacagcaaaaaacaaaacaaaacaaaacaaaacaacaacaaaaaatttaaaaatgggcaaaggacctgaatagacatttcttaaaagaagacagacacatgaccaacagatatattttttaaaaaagctcaacatcactagtcatcagggaaatgcaaatcaaaaccacagtgagatatcatctcaccccggttagaatggctactatcaaaaagacaaaaaatagcaaatgctggcaaaggtgtggagataagtgaactcttaaatgtggctagtgggaatgtaaactagtacagccactatggagaacagtgtgaaggttcctcaaaaaactgcaaatagaactaccatgtgatccaacaattcattactggacgtttatccaaaggaagggaaatcagtatattgaagagacatctgtactcccatgtttattgcagcactattcacaatagccaagatatggaatcatcctaagtatctaacaacagatgaatgcgtaaagaaaatatggtatatatacacaatggaatagtattcagccataaaaaagaatgaaattctgtattttgaggcacgtggattgaattggaggacattatattaagtgaaataagccagggacagaacattaaacactgagtgttctcattcatatgtggaagctaaaaaaaagttgatctcagaagtaaaaagtagaacagaatactacaggctgggaaggatagggtgcggggagggtagggaacgatttgttaaaggattcaaaattacaactagataggaagagtaagttctagtgttgtataccactgtaagatggctgtaattaacaatatgttacaaagtttcaaagagctaggaggaggatgttgaatgttcccagcacaaagaaatgataagagatgatgggtatgctaattaccttgatttgatctctgtatagctatgaaaatgttactatgttcttcataaatattaatacatcaaaaaatttaaaattaataattaacaaaagataaagggccctgaactctagttttagagctgaattgtatccagtcagatagtttctatgttatttaaatgttcactttaaatttggagctgaaatatatttggaaatctttacttttagtatgttcatttgtgtgtgtgaggtaaacttggttggctattggcaaatgtattgggtagctgcttaataaaacatttccttccagtgcttcagctttctgatgcttagaaaatatgtataattaacataatatgcattatcacttttgaaagtaactaattattcgaacagttatttgtgccaaattagtaatgtgaatttgggaactatcagtcttttctatggcccggaataatttaaataatagaaattatctgattagatagaaatcattgtaaaatcatcaaggttaggatttcctttgacttttgcttatcattagttttaaagaaaaaaaataaattgacataatggaaattttcactgtacatcaggaagggaattcagtggaaaagtaagcttcctattcactcttgaccttcagtttatactttttttcctaagtcaagtactgctactggtttcttatgctctttctagaactagcctgtttattgtctatttaaaataactcattaatcaccttttatttgagctcccttatggatctgtgtagtttttctgtctctttaaaattttgtatgcggtaaaatgcacgtaacatcaaatttaccatcttagccatttttaagcatacagtttagtagcactatctttcacatcgttgtgcaatcaatctccaaaacctgttcatcttccaaaacaaattctgtatctattaaacagctctccgttcttccctaccctcaactcctggcaaccgtccttttactttctgtctctctgaatttgactacctcatataagtggactcatacagtatttgtctttttgacatgggcttattttacttagcataatgtcctccagttccattcatgttgccttgaaagacaggatttcattcttttttttttatggctgaaatagtattcatccatgttgtagcatgtcaggatttccttcctctttaaggctgagtgatatattccattgtatatatataccaacattttatttatctaaattcatctgccaatggatttttcagttgtttccaccttttggctattataaataatgctactgtgaacatgggtgtacaaataacttcaagaccctgcttttaattcttctgaatatatatccagaagtgtaatttctggatcatatggttattttatttttgattttttgaagaatttctgttgtttttaaagtcacttttgatggtttgttctttgctagaaaatatatatttcagttttatcagtgcagagttgtatataatacttacatattttgtacaattatataaaggttatattatatttccatattctcatataattatctttagtatccatgtttgtaactgtttactcatttctctttcctcattcacgtttactattttattggtctttaaaacctaggctttgattttgtttcctagcatttaaatttttctgtttcattaattttagctttcattttatttatactgttatttcttgaggcaatggcttggttcatctattttcagtttttaaaaaaactgtaaagtatttgtaaggctctaaattttattttattttttagttataggaatttttaatatattctggttattcaccccttatgagatacattatttgcaagtattttctcccactctgtggattgttgtttcatcttcttgatagtgtcgtttgatacacaaaagtttttattttgatgaaatccagtttatctgttttttcttttgttgcctgtgcttttttggtatcatatacaagaaatctttgccaaatccaatgttgaaaatatttttttttcctatattttcttataggagttttatagctttactgttaagttttggtctttgatctattttgagttaatttttgtatatgatgtaagaaaagggtccatcttcattcttttgcatgtggataatcagttttcctagcatcatttgttgaaaagaccatcctttctctattgaatggtcttagcatctttgtcaaaaattggtcatatgtgtgagggtttctttctaggctctctattccattggtctgtatgactgtgcttatgctagtaccacattgttttgattactgtagctttgtagtaagttttcaaataagaaagtgtgagttctccaactttattctttttcaagatagttttgactattatgcggctctttgagattccatatgaattttaggatgggtttttcctttttttttttgagatggagtctcgctctgttgcccaggctggagtacagtggcgcgatctcggctcactacaagctccgcctcccagggtcacgccattctactgcctcagcctcccaagtatctgggactacagggacccgccaccatgcccagctaattttttttgtatttttagtagaaacggggtttcaccatgttagccaggatggtctccatctcctgacctcgtgatctgcccgcctcgacctcccaaagtgctgggattacaggcgtgagccaccgcgcctggctttttttttttttttttttgcaaaaaataccattgggattttgatagggattgcattgaatctgtatattgctttgggtaatattgttaccttaacaatctaggaacgtgagatatctttccatttatttatgtttaatttctttcagcaatgttttgtagttttttattaagtttttcacctccctgattaattcctatgtattttattttggatgctatcgtaagtggaattgttttcttaatttcctttttgtatttttcattgctaatgtatagaaatccagctgatttttgtgtgctgattttgtattctgtgactttgaatttattagctctaacagcttgtttttggtgtgtatgtgtcatctttagggatttctacatatatatcatctgtgaatagacatagttttgcttctttctgtccaaattcaatgaattttccatctttttcttgcctacttgctctgtccggaatttctagtattatgccaaatagaagaagaaaaagtgggcatcctcatcctgttcctgatcttaggggaaaaacgttcaatctttcactattgagtatgttgttagctattggtttttaatacatggcttttacgatgttgaggaaatttccttctattcctagcttgagtgtttttttatcataacaggtgttgaactttgtcaagtggtttctctgtattgattcagatgatcatgtggagtttcttcttcattctattaatgtggtatattacattgattttttcattgttgaatcatcttgtgctcctggagtaagtttcacttggtcatggtgtgtcatccttttaataggctgctgattttgttgagtttttcatcagtattcctagggtgtattagtctgtagttttcctgtagtatttttgtctggctttggtatcggtaatgttggaccatagaactaatgaagagaagtgttcccttctctttaatattctggaagtgtttgagaagcattctttaaatgttgggtggaatcaaccagtgaaagctatctggtcctagccttttctttgggagctttgtgattactgattaatccctttactagttatagttctatttagattttctatttcctcatgagttagtttcggtagactgtgtgtttgtagaaatttgtccattttgtccaggttatccaaattgttggcatacagttttacatagtatcgtctcataattctttttatttttgcaaaatcagtagtgtcaccactttttttgttgttgttgagggggtgggggggatagagtcttgctctttcgcacaggctggagtgcagtgacaagatcttggctcactgcaacctctgcctcctgggttcaagtgattctcctgcttcagcttccctagtagctgggactacaggcatgcaccaccatgcctgtgtaatttttgtcttctttacagtagagatgggggttttaccatgttgatcaggctggtcttaaactcctgacctcaagtgattcgcctgctttggcttcccaaagtgctgggattacaggcatgagccactgcatctggccgtgtcaccactttcatatctgactttagtaatttggtgttctttctctctgtctctcttttatttatttatttttttgttaacctatctagctagagttttgttgactttttcaaagaatcagcttctggttttgtaatttttctccattgtttttctgttctctcttttcactctaatttttattattttctttcttctgctagctttggtgtagtttactctttttctagttccttgaggtatatggttaggttattgaatgagaactttcttattttttgatgtcagtgtttacaggtttacatttttcttttagctctgcattcactgcatcctataagttttagtatgttgtgttttcgttttcatttatctcacgttggtttctaatttcctttgtgattttttcctttgatctattagttaacattcacaaattttcacatatttgtgaattttttagtttttttatctgctgttggtttttcatttccattatgatcacaaaacatactttgtatgatttcagtttctttaaatgtattaagacttattttgtagcctaacataggtctgttttggagaatgttccatgtacacttgagaagaatatattgtgctggtgttgggtgagtttagtttttgacatgttacatttgagcattcatttaggagaaaagccaaaggaagacatttgttaatgaactgtaaagaggggttgacatcacaagaataggtaattttttttgagaaacaaatttagagcaacagaacagccttgaatatattcttatttagaaggctgaaggttgaatataacctggagtgttagaaaagggtggaacagtttatcatagaccagagccaagaaagtataatatttagactttaaatatcaaaaagaagatatggtcagctgaattcaaagttgaaggctaggtgtggtggctcatgcctgtaattctagcactttgggaggctgaggcagaaggatcacttgagcccaggggttcaagaccagcttggccaacatggtgaaatcctgtctctactaaaaatacaaaaattagccaggcatggtggcaggcgcctgtaaacccagctactctggaggctgaggcgggagaatcgcttgaccctgggaggcagaggttgcaatgagccaagatcgtgcctttgtactccagcctgggcaacagaggaagacaccatcttgggaaaaaaaaaaaaaagaagttcagaaaacagcttgtttgggaaggactgttttttgtattcctttaataattcaataaagaaaatagaaaaaggattttttttaaatttgagaaacatttaaatgatgaccactacttaaattatgaaattgaaaaccacaaatataaattatgcattctttatagtatgagttttagaggctgttaatttgctataatattagctacatctggaatagaagaaacttcatatattatcttatcgctatatttgaattctgtagaagttatttctggacagtctacgaaaagctcttgctggccatggaggaagtaggcagctgacagaaagtgctgcaattgcctgtgtcaaactgtgtaaagcaagtacttacatcaattgggaagataactctgtcattttcctacttgttcagtccatggtggttgatcttaaggtaacatgcttattctttctctactacaaactttaagaaaattaaatgaattttctagcataagtattatgtcaaagataattgctaacattaaagttctgactcttcgttgataagttcataggacttgcttttgttgttactgtgttcatcagcctaaatggactgagaatatgaagaaaacaccattttcttaaataagcataaatatacagacttgggtttaaaataatgtggcaattagggcctgaaatgaacctatatatggtataggaagaattgtatcagactgatgaaccacagtatgggtgctttgtgcttcttctggcagctggattttactgccatttgtgtgggtaatgtgttgatgttattacatgttagtaaagaaatactgcatgggtatttaaaggcttttgttttctgttggggtttttatagaacctgctttttaatccaagtaagccattctcaagaggcagtcagcctgcagatgtggatctaatgattgactgccttgtttcttgctttcgtataagccctcacaacaaccaacactttaaggtgagagcattggtttttatctaactatatttactgatgctgttatcctttataaacaaaaagactatagagattaataggttcacttttatcggtatttctcactattatgtattgatgttcgtttcaagaccttaaaaacttagtgttttttttttaaactttctatttgctgttctttttggcttcatttgtattactgagtatttttctcatagaaataatctgcttttttttttctttttctatagatctgcctggctcagaattcaccttctacatttcactatgtgctggtaaattcactccatcgaatcatcaccaatgtaagtccaaaaggtattgctaaattactaaaaaaatttttttctttcttttctttgcgtatttctttttaagaaatgcactcttggttttcaaaaaggttctgaatttagatgtatgaaataggaaaatttctccatggtgattctatttgataattgataaatatttgtatttttcatattaagtcttgaccgaagggaccatattaaggaagatggagttaataagatgctttggaaagattaaatctaaaacgttttattcagatcagaagcccttgagaaaaatgtcactgaaaatacagtttaaaattttcatcccgaagcttttcaaacatattatttcagcatttgatacattgacttgccaccttaccatttaagttaaaagtaatagtatttatgttgtagtctagtatagcacattgacaaaatgatgggactatatttgatggtacttttaaatcttttgatcctaaattcattcatagtgtaaaatttcatttttcttaaacaaaatgaaatattaacatactttaaagtaggtattaacaagatacaaaagcatatcagacaaagtaagtgaaatcattaaaaggtacttgcgaaaccttcaactctgtctgatgtggagacattaaatagacagcaaaactatcagatttggactgtggatttttaaaattctgttcttgtaataatgaacaaccctattttgaaagttttcaagtgttattttccattgttccacttttatcaaatgatactcacatttatgggtaaattggttgatgctttccttccttaaaggaggctgtaatcattgataacttagtatatttgacctgtttataatcaaattccattttaagactgtgcctctggtgagttgaaaataacccttcacctcatttgccctggatgttgtatttatttaaaataaatactgcccatattctatccattcctgcagtggaaaattaactattgataaagctatttggtgatacatttaatttttctcagcaggtgtttagtgagcattttgggaggacagtcctttgttgtgcaggatgccttgggcattgcaggacctttaagatcgtctggcctcatttcattaaatgccagttgtgctgcatctccccatccctagtcattatgaacaaataaacatgcctgagggaatgatacctcctcccttagttgagtatcactgagttaaattgtaggtaaaagtaacattgaatatgctttgttccaaaagggaaagtttaatgaagattgtaaataaggtatgtttgtattaaaaacttaaaaaaaatcactgtacttttgtcagcgtaatgagccagggcattgtaccttcaaggtttactttcaaggccattaaaacaaaaagatgatttctcccctcaagtttatgtgtaactcagaaataagtcattattgcttttttccgctgtggctcagaacactaaaaatattcaaagagtggatagctttgcataaatgcttaaaatttgtatacaataaacccaaatatatacttttttgatactttgtggctagttactttaattgtgaaatatttttgtctacaactgactacatagagcactttcaagcatggacttggcactgctgtaagtggctgagctgctcctttctgggttccaagcatgcctggagtggtgcttcatgcatgcctcagtgtacttggtgaaagtggctgtgcatcctcttctactctaatgagcactgcatgtgtggagggtggagtgtgtctgtatcagagatcaagttatatgaaaatctgtttttataaagaaaaaaactacattgaataatttttaaacattaagtatcagtaacttttcaatgaaatagcttgaaaaggaacataaatattagttcaaagtatctttttaaattatgctttgggtagtgatactttattattatagatagtgtgggaaattgtttctcgttaggatattttcccccttggtttgaggctaatcgctattgaatctgaagtactcttttggttgaaaaggactatttataaagtgaatatagaaatttatgagattgactattttagagtttcatttgaagacatttattatggcaatatttttgtcttgaaaaatcacatgaaattattcttagatatttggacttctgatcttaaattcattcgtagtgtaaattttttttctaatgattcttggttcaatgtacctcataagttctcttctcccatggttctttagccagtccacacattttttttaaagcatcacattctcaaataagataaaagttttagtgatgtgtattgagggtttgtgtagaagtagtaaggtgtttggagttctacttttgtgaaacatactcatactcagttcataagtactgagtttagatctaaaatattctagtgtttcttcttagaaaatctaaaatatatccactatttgattcttattataatgcaggttcctagcagttactaaaatagtagttgtactgtcatcttttttattatgatgtgccataagagatgaattaatagttgtaagatctatgttatatgcataatcttcatagacttcctttaggttaaattagatatgtaattgggaaatttaaaaagtaatatacacacttatgaaccaattatcttagccatcactggtacatgctatagctggtatattacttatttctgttttttccttacgacaatttatcgtaatttacatatggatagttcacatactgaaaatgagatgattgctttctactgagaggttgtagttgaaaggaattgtttccaaggcatttgaaaattatttaaatctcttaaggaattgccacataatttgttcatattatgtaagtgttgccatttggctataaacatggtattttcaaggaaaaaaagagtaagtctactttaattgactggtgttcaggaagggcacatttagtaactgctcaaaatactaaacttttttgccaaccacatgatgtctagtttttcatacttattttatttgaaaatgtgtattttactttaaaatgaatatattatgaaaaatgaaaactatgaaaattactaaatcttaagcctaaagttattttatgtggtgcacctggtaccacaatacggtttcaaaagctattaaaaaaagacacagtaatttgaataggatgttatatgggatgcctttcttagtttatcagtttctgacaagatcttacgagatgtgttgggtaaggaagacccttcactcaatgtactttgttattattcagctttttgttactttaggctgattaacacaagctgtataatttagtaagtataaggaaatcaagttgcattggttgctttgggcaagtcaaaattgctgagagttggaggaatccattatactatcagactaaaaattgatcatttgtagaaactagattaaataaagtaggagttgagggaaaaatgtaaacaaccatactgtcccaaaaaagcatttcttccctcccagttttgggattcctccctgaatggagttcagtattcaaaatgtgtatcataagttggttttatattttactatccggcgaacaggatttgtaatccacagtttgggttaaggtaatataactcgatgctattcaaaatattctgagaattccaagtgaagaaattaaaatgtcgagacttcaattagcttagttttgaataagaaaaaatctgggactgaaatgtgagagatgtgaggctattcaatccctcttatctacaatttgaatgtattattcttccagattttttaaataaacatctggagtattataaattagaagcctacattttaggtcatttaatgcatagtctacatatgtagtgaaaattcatccagtcagttttttattaaatgatagactttaaagatatagtgattttcacaattgtcattttttaataatatatcaagtaattcattttaaagttaaagatacacttccaaataaaataggcactaaaaactagacatcagagttaaacagggtaaattgaaatagaaaatacataaaataattgtttaaaaaatatttcactaggatcagtttgtctttgtttatggtaattgttagtctcccatatatcatgtcatcattgcatatcaatttataggtttacttaatagttttatttcatttactaatttcatgttgtaattatcattgttgtctgtaaacatataagtaatggttttccacatacacttttaatactgtgttgaaccactaatcacttttaaagctttgataatagcattcttacctgggaaaatatatgccatgtatgcacgtgtgccagaaattgtaaaacattaaacttaaaaaaaaaaaaagaagattggctacagattagctctctgaagactttatttttcaaattcactggctaatcatcgagaaaagatgtctcacatgcacatgctcataaagtgggcaatttgtctcatgctcactattatgttttataatataatatgtatgagttagtgtttgaattaaagacgttgtttgaagactttggaaatcatggtgtgtgtttgcatggtcttagaaagttcccgacaaaaggataaaacttaaaactacagtgataaacagagcatacaactcacgtaattttgtactttttcttcctattggtctttgtttttctctagtccgcattggattggtggcctaagattgatgctgtgtattgtcactcggttgaacttcgaaatatgtttggtgaaacacttcataaagcagtgcaaggttgtggagcacacccagcaatacgaatggcaccggtaagataaatcacgaattttgaatctcacctcctttctattgcattttttttagtgtctttatcctattcctgctgctttggttattttagagaattgaatgggtccttcatttcctctaaatgttgtggtatgttgtatctagaatattgttgaatactagattatgtttgttttccactgtttccatgagttgaacttaacttttcttagataaattttctcacaaaacactgaaagtcttaatgaatgtcaccttttttttctgtttttaaagttttttttctccttaaaacttttgaacaaaaatattttgattagcctctcacgttttggggatgagtaagggaagctgactcctgggttagagtgaatgttgctgccaatgcacattttagctaattgaatggtgactattaaacataggaaatgaataaaatttagagtttttgtatttaaaataaaaatattttgtatttcaacaaatatgccttgaggttttacaactgataggaactttgatactgacatttgactctaaacttaataaaaagcagacttaaaattgggtattctcacagattattactcttaatatggaattttaaaactcctatggaatcaatttaaaaagataattataagattgtggaagtcatttttttggtgtttatgtatagcaagagtattatacaagagcaactcttgacattgattggtggtgctttgtcttctgcttcttattttctattattggctgctgtcgctcacatgatcagatgccaaccagtcactgttttgcatggcagtgggcttctgtggctgtaagtatgacccattgtaactacatcagaaaagtccttggtttctttgacttttctgtgtatagttaccattatagtcacatcttgtcatttcaactgaaaatatagcatgtcttcacctgttggttttatctagtaagttagtcatttcacagttaggagataatttaaacagctttctccctggcatgcttctctttttccaagtccccttagtcagtgaaatattttggttttatacagttgtggttcactcttatccagttgtcagtaattatttctgaggattgtttatcttagatgttcaaatagagaagttttttatgtcatatattttgggattattgagcctaaaaaatatagccaaaagatcatggcaatgatgtttccttaagtaaactttaaaatgcaaggttaccttttagttgactttttgtaatgccaagtacttcacttttttttaagttgaagaaattttcagtacaggtataagttaattggaggtaagcataaataatagctgtttaaatgtcatttaataagatatttttaaaaaatcttttaaaactacttgaaataagttgtttaaaagttatttattgacctgtttattccagagatctgggaaatcagaagtttatttgacttttttgctttaagtttactaccttttctggtagaaagttaatgacctccaataataggacttgttggggggttaatattcacttcctatttaacttcaatatccactttaccagctgcccataattttctgtgaataaggactaaaaatgaaactaaatgattattttgaacagaggtaaaatttgattggtagtctaaatatgttctctacacttagaagttattttacttcttagccctagttataagctgattctcagagctacatattattttaccgaaaagccataactagagaggatttcctcttttggctcaaggacacctgtaataagaatttagtttttatttctaattattttctgaaaatatcaatatacatttaattttcaaaatcattcctaagctgtttatgtttttgaaatgttatatgtatgtatatttgtacataatgactaaaggacagcttttgggctgatattaccaggagagaaaataaatagcaaatgtaatatgaaacaatttttagaataagaaaattttaggttttgaatggctgttagggtaaaatctcacccttcataaacttggtgagttaacagtcagataaccagtatggaagtattgaccttctactctttgccaggcaaaggtgctaatgccagggaagcatggtgaactaaacatacacagcacttcccctcaccgagattccaagcaaaaggtttatagcttttgcttgaaaatgtctaatgaagaactcaacaccggacacggtggctaacgtctgtaatcccagcactttgggaggccaaggtgtgcggatcacctgaggtcaggaggtcgagaccagcctggccaacatggtgataccctatatctactaaaaatacaaaaattagccaggcgtggtggtgcatccctgtaattccagctactcaggaggctgaggcagaagaatcgcttgaacctgggaggcagaggttgcagtgaactgagatggcgccattgcaccccagtgtggacaacaagagcgagaatcggtctcaaaaaaaaaatcaaacaaaaaaactcactacaggtggcatggagtctggcaacacaggcaaatatatataataaatggtttacagataatacctaacatcagagtttcctactgttggcactattaacattttggactggataactctgttatagggggctgtactgcgcattgtgggatattcagcagcatctctggcctctacccactagatgccaatattccctttaccccccagccctccaagtcatgaaaaccaaacatgtctccaaacatttccagatgccccttgggggacaaaatcacccccagttgagaactactgtattacagagtatgttcagtgggttgtccctcatttgtattgcctcaaatgatttgggactgataaacctgagccattagcttgcttcagaagtagcaatctaggagttctgttgcaaaacagtaaaagtaaaataatatctgcttcaaggctttactaacactttgtattttggagagacaagttacttgttggaaggagctaattatttgaaaattttctcttcgaccaagatagaatcatgtctctgtcacttacagccatcactgatcctctttctgttggagctctatagaatacttctgattcttccacaaggtggccctgcagatatttgaataaggttattctgtactcctagaattcgttttatttttatatcgttttggcattggaagggattttattcttttagctctctctctttttttttcttcttgagacagagtcccactccgagtcccactctgtcacccaggctggagtgagtgcagtgatgcaatcttggctcactccaacctctaccttccaggttcaagtgatctcctgctttagcctcccgactagctggggttacaggtgcccaccatcatgccagctaattttgtgtttttagtagaccatttagcaccattttgggcaggctactcttgaactgtgacctcaggtgatccacctgcctcagtctcccaaaatgcagggcttataggcatgagccactgtgcctggcctcttttagctctctttaaaactgtatgtgtgtttgttgggtctgtttttatagctaaagaaactgaagcttaaataaagttatattaataacaaatgcatggttaatgaacagtcaaccagagttagttctgaggtttcttgacattcagttcagtgtctttatcaggttctttagttgtccttcttcactagcaagttagcttgatgaaagcagtagctttgtctggcttaatcaacactgaatccctaacgtttgaacaacatctgatacatattgggcatttagtacatgtttgcagaatgaatgaaggaatgaatttcttacttgatgtggtttcaaaatcctcgtacaggccgggcacagtggctcatgcctataataccagcacttagggaggccggggcgggcaggtcacttgagaccaggagtttgagaccaactgggccaacatggtgaaaccttgtctctactaaaaatgcaaaaaaattaggcaggcgtggtggcaggcacttgtagttatagctactcaggaggctgaggcaggagaattgcttgaacccgggaggcggaggttgcagtgagccaagattgtgtcactgcactgtcagcctgggcaacggagcgagactctgtctcaaagaaacaaaaacaaaaaacaaaaaaccctcctgtttctgatttgcttctcttctggaaagaccaacctgacaaaaatttttaaaattaaaatgccatattaagatctgatgttagtgatacagatataatactatgatgtaataattgataaaagctattaaactgctgtgtttgtataccctgtttctattaatacaatctaagatagtattattattttatgttgactttttagttatttaaactctttggccctttttatatgaatgttgagccataacttctcctttgtacctttgtagtatttttttaatatttgaaatgtttgtcttagcactgattttactatttgcaaactaacatctcctgctttcataaaattcaaaactgccaataacagatatatgaattttcacaagtatttgttatttctcaacattttttatcttaagtggcatgctggctcaccagatctttcttacatgcctgttattcagtcacatggtctaaattaacaagtggtttgggcctttaatagatatctgaagactctggttcatgaatttcttcccagacatgattgcctctcatctttggccagatcacatgtaccagcttctattcctactaatacctgcaatatagaagatcaactaatgaatgaatgaatttttttcttacatttctaattaagaaacacattgcttctttagcatgtttttcctcactttctgtaacccactaaaattaaaaggtatttgagatgaattaaatttattggaatttctgaagtcatacatttcatattaggcaaccatgttggaacagaatttacatgttgatatttgggattaagaggtgacataattaaactaatatagtcatacatcacttaatgacagggacatgtcttgagaaatgagtgcatccttagtgattcagtcattgtgcaaacatcatagagtctgcttacatgaacctagatggttatatagcctgctacatacctaggatatatggtctagcctactgctcctaggctgcaaacctagactaaacagcatgttactgtactgaataccttaggcagttgtagcacaatggtaagtatttgtttattcaaacagaaaaggtgcagtaacaatacagtataaaagaaaaaaatgtataggacacttaacacaaatggagtttgcaggactggaagttgctgtgggtgagtcattgagtgagtgttgagtgcatgtgaagcctaggacattacactactgtagacttaaaatttttttaaatttattttacttttaatacttttgcatttttctcatactcaggatctatactgtagactttataaacactacacttaagctatatcaaatttataaaaaatatttttatatgataactttacagtagcttttaaaatataaacttttaaattttttaattttttgacttgtaataacacttagcttaaaacactttgtatagctagctgtataaaatatttttctttatatcctgtaagttttttctatttgaaaatgttctattttaatttttattttgaaaactgttttaagatctgggacacaaacatacacgttagcctaggcctacatggggtcaagatcatcaatcagtgttactgtcttccacctccacatctgctcccattggaaggtttttaggggaaataacgtgtggagctgtcatctcttgtggtaacaatgccttcttctggaatacctactgaaggaccttctgaggctgtgtttcatagttaactttttatctttaagtaggagtataacaatacaaagtatactatagtaggctgggcctggtggctcacgcctgtagtcccagcactttgggaggccaaggcaagtggatcacctgagatcaggagtcgagaccagcctggccaacatggcaaaacctcttctctactaaaaatagaaaaaaattagctgggcgtggtggtgcatgcctgtagtcccagctacttgggaggctgaggcaggagaattgcctgaacccgggaggcagaggttgcagttagccgagatcgcgccactgcactccagcctgggcaacaaagtgagacttggtctcaaaatatatatattataataaatacataaaccagtaacagttatttattctcatcaagtattgtatactgtacataattgtatgtgctatactttttttttatatgactagaagtgaagatttgtttacaccagcatcactacaaacaataacgcattgtgcttggacatcacgatggctatgatactaagtgataggaatttttcagctatgttacatattgtctatcattgactgaaatgttgttttgtggcatatgactctatttacgttttttggaaatgattcttaaggaaaaattctgatacctgctcattgttctctgatcttgtgttcctgtgcaatggctgcatcagggaagagccatttgatagttacacttagttacatcaaagtaaataaattcgtttaatcaaagtttcagcttgatctgaggtgaaacacctcaacttagagtgaggaaaaaaatacagttgaaagagagcaaacagtaaaaccagaatttattaaatcatttagtaaaacatttgctttggggtcagggggcagttataaaaagcaaactatttggaagttttgctatttctcttctgtagtgacattcttgagtataaatgtgtgcattaaatagctattcttccccgcaaggactaaaacccttcggtgttcttgggtataataacaaatgcatatttcacttaaacattgaggatagttcatttgtgttgtagatatgcatgtctgcttcttaactttgaaagacagcctgtttacctggacatttgtattatgggtccacagttggtacacagtcttgttatttctgtattatatatatgtttacataaagacattcattcagaatcagatagttttgtgttcttttcaaggaaaaaaggaaggagatgttttataataataggtgatgttagctctggaatataattgttggatttttggttgaaaaacatttataattattttaattcatcatatgtctctataattgaaacatattttctgtaagtttacctttctgagttctttctgttttacaaatgttcttcaggcaaaatgcatgcattctgtaacttaaaagaggtggagtgccgtcgaaggaaaaagcaaattttacaattaaactagtaaatacaaagattgcctacatgtttcattaattctaagaagcacttatttttactcttctctaaaattgggaatgtatcttattttaaatggtgtcttacaattgacagcagtttttcattccttttgggacatcaaataatgatgcatcttacaattgataatgttgtagagtctatgaaatacttgtatgtatgtctggggaatgtttgttaaataaattacccagtgtgtatatttgtgagaactataggccaaatcttttttcccttatgtttttacattttagaaaatagttttttacatagatgttttacaacctgatactaagcttttagtattgtaatagattttcattgttttattagattgataaaaaaaaatataaatggtgcaaaaacgattttcattgttttgttaagcttaataatactgaccttatgcttactattgagtgtttctactaataccacacatttggtagtataaaaaatagcttttttcaaaggtttttaataataaatttcttttaaaaggttggatagctattatcctgagtcttatgtctgataccatgtttttgttttgtttttagagtcttacatttaaagaaaaagtaacaagccttaaatttaaagaaaaacctacagacctggagacaagaagctataagtatcttctcttgtccatggtgaaactaattcatgcagatccaaagctcttgctttgtgtaagtatttttttatgaaatgtctcaaaattatcacactaagttaattgggtttagctgaaacgccaagaccttgaggataatttttagctcaagagcacttactgatcctttctgatcatacctgaaaactaagacgtctctaagaaaactaatgtataatgaatactaatataattagatcagattcttaattgcccttatcatttcctaacatttctctttcttcttaatttccctatcattaaactaacatactttgatgagatctctgttctcatcctattactaagttatatattattcaggtataatcctggtatgggggatagaagtgaccatcgatcacagtgtctacatctatactgttggtttaaaaaatctccagattgcttttgccagtttagcttttctatccccctttctttgtgttatcagctttctgttatcattggctctgcctacaaatactgtattggaaaaagaatgaggtgaaaatgggtgtggttagtacttgagttagtgtgattatcattattattattattttgagacagggtcttgctctgcttcccaagctagagagcagtggagcagtgatggctcactgccttcgaactcctgacctcaagccatcctccagcctcggcctccccaagtgctgtgattacaggcatgagcccccatgcctggctagtagtcagttattgtcataactactcttactgcctcagatgatattaaatttctgagaacatcactctggtacacagagtaattaggaacaacgcaaataataaaaatgagtcataatgaagtgattaacagcatggacgctggagactacctactagctatgtgatttggatgactatttaatctttctatgccttagttttctcatctgatatattgggatcataatagttcctatctcagagatactgttaggaaaattgaaatagtacatacaatgctttaggaacaatgcctggtgcataataagcactaaataaatgttagctattattgctattaataagatacaatttaacactaattaatgcaccaaatgtaatagttctatattgtgtctttcataggatgacatgtttaacctttgttgagcttcttcagtccctggagagcagcatcaagcaaggtttcttatcgttttgctcagtaactggctttttaaaaagtgttaaggtgctttcgattttggtggcatattttttaaattactgtaatacagggagtttgtaactacatgcctatgattccaagagttctatgaaacttcgtgaattttttaaaaatgtgtatttatgagtaatttttcttggagagtggagaggagagaagaaggaacattcccaaaggatcagtgaccccaaaagaaggcctgtgatactttaagcctgaaaaacccattcaagtttgaaagtctaattagaataaacagatctttggcatgaaaaaattccataaaacctgtcagtgaaactctataaaaaaatgaagttccctttctcttcattcctttgttatgtgttacaagctatttgtggcattatttcatcatgaaggtcacataatactagcagtactctgtttacgtggtgataattcacattcaaagcaggcaccaaactcaccaatgccgtttctactaaatgttgcttcaagaagaatttaagcaaaacttgccattttccaaggatcatttaaaatggaaattatttgctttgctgccatctagtggttaataagttttctcaaggtaaccataagtacattaaaatagaagattcgttgtaaatatttgaccattttgtcttttacataaaaaatctgagtcttagtaatttaggaggaatgtaggaataattattaaatggtctcaatcatggtatttttaaagtaatatgattttgtcttccattttagtactctcaatttctcaagcctcctaattactcagcttgcatcgtttcttagatccccctgatcatttctccacactgaagttatggcagtctctttaaaaagcaaatcttattatgccccctctcagcttgaacccttttagttgaaattgctcttgcttatgaagaccaaactccaaatagatctacagggtcgtgcaaaatctttctcccatctaccatttcttccacatgtagcattacattttttgtcttcctttactctattcatgatggtcttcctttcagtctttctaaccacatgccttcatacctcccttgcagttgcttttccctctgcctagaatctgcttactcttaacatagtaattcctactcattctaagctattgtcactgcactaaggaagcctccctgagtcggacacttttccatgttataggctgtcatagcagcatgtaccttaataatagctcttatgtgatttgcatttttatacttgttgatctgattatttcattgatgatatcttcccccatgagactacatgctcatggaggatgggaaacacatcttctctttttcattgttgtgtctttggcattcaataaaaatgatttggttttggatgaatttatatgaatgtcagaaaataagctaacggttttgaattacagatatattgcagtgagggcttaccttagtcattataatggggaaaaatctatagttagcaaaataaaatatgggacacaagttgcattggcttcatatattcttcttttttttttttctgagacagagtctcactatattgcccaggctagagtgcagtggtgtgatctcagctctctgcaacctccgcctcctgggttgaagtgattctcctgcctcagcctcccaggtagctgagattacaagcacccgccaccaaaccggcttgtacttttaggagagatggggtttcttcatgttggccaggctagtctcgaactcctgacctcaagcactccgcctgccttggcctcccaaagtgctgggattacaggcatgagccaccatgcctggccaaaccatatattcttgaagtgcaaatatatgcttccaagttaagagaaacattttagtctctaaataggtaggcattcggcagggcgtggtcgctcacatctgtaatcccagcatgttgggaagccgaggcaggtggatcacctgaggtcaggagttcgagaccagcctggccaacatggtgaaaccccatctctaataataatgcaaaaattagctagacgtggtggcgcatgcctgtaatcccagctactcgggaggctgaggcaggagaatcggttgaacccaggaggcagaggttgcagtgagccgagatcacgccattgcactccgtttcaaaaaaaaaaaaaaaaaaggtaggcattcacatttttacataacgttaattttctttgcttagtacactatatttttccacgatgaaaaggaccgaagtatgggtatctgccgatgcaaattctagcctttgctttgttaccagctgtgtggatttgggcaggacctttgtatgggtcaagagggctgtacaggataatcatgcaatccttatccaacatgtatgtcctttacctttgatcacaatcatgtataagctcaaaaccagtaagttccaaaccagagatacgttctttagccagtttactattgttggaaaaaaaattattcctcatattgttgatgtaatttttaatgggaattcgtggtttttgttttcattaggattttccctggacattattcacattaatgaacaagtatagatgtggattaaaagaatccctaacaaaagaagttttgatttaataaaatttttattttattgagataaaaatactatacccacataccataaaattcaccatcttaaagtttacaattcagttgttttcagtatatttacaaggttctgcaaccattaccactatgtaattctagaacttttttttctttctttcttttttttcttttttctttttttcttttttccagatggagtctcgctctgccacccaggctggagtgcagcggtgcaatcttggctcactgcaaccaccgcctcccagcttcaagcgattctcctgcctcagcctcccaagtggctgggaccacaggcgcatgccaccacgcctggctaatttttatatttttagtagagatagaatttcaccatattggtcaggctggtctcaaactcctgacttcaggtgatccacccgccactacctcccaaagtcctgggcttacaggcgtgaaccaccgcgtccagcctagttctagaacattgttatcacccctaaaagaaacttggtaccctttagcagtcactgtctatttcttcctccttctaatctctctcgatttatttatttttttaattgaagtttcctttttttccttgcagaatccaagaaaacaggggcccgaaacccaaggcagtacagcagaattaattacagggctcgtccaactggtccctcagtcacacatgccagagattgctcaggaagcaatggaggtaaggggaaaatgaattccatgttcttgaaggaaagattgtaactatgtacattcatgatgttcctttggtgtgtggtttctgtgagtaacaggtagatgtcatttctggaaatggtatgtttatgtctatacattgttttataaaactccatggagaaagaaggggtttacttgctttgtatcacatagcaataacattgtacaaattctgatgcttaataaaatagttcgagattttctaattgcagttgactttaaaatttttaaaaatattattattaaatattaaaaatactaatttttaaattgagacataattcacataccctcaatttggccattttaagtagttcttttttttaaattttattattattgtacttttaagttttaggttacatgcgcacaatgtgcaggtttgttacatatgtatacatgtgccatgttggtgtgctgcacccattaacttgtcatttagcattaggtatatctcctaatggtatccctcccccctcccccctaagtagttcttattcacacagttgtgcaactatagctactctctaatccataacatttttatcaccccagaaagaaacttgactccccattccctcatccctaccaactactaatctattttctgtctctatggatttgcttgttttagatatttcatataaatagaatcatagaatatgtggccttttatgtctggctaccttgacttaatgctttcaaggttcatttatgttgtggtatgaatcactattttcttcctttttattgccaaatatttcattgtatggatctgttttgttcatctagttatcagttggtggacgtttggtgttgtttctactttttagctattacaaataatgctgctatgaacatttgtgtaaaagtctatatgtggacatatctcttaagtatataggagtggaactgctaagtcgtgtggtaactctgtcgaacttttgaggaactgtcaaactctttttctgaagcagctgtatcattttatattcccagtaacaacatatgaaggttttaatagttctgtatgcttgctaacacttcttataatgtgtctttttgattgtagccatcctaatgtacatactgtacaaatgtttatacatacccagtaaaaatgtttataaaaatattttagcacttactacgtaatcattgcttccatttgtgtacattgctattggtcccgtaaattgatacatttcttgtagtctttttggaaggctatttggcaggagctatacaaacatttcatttttttatgcaaataattcaatttctatcactttaaaaatcttatgaatataactcaaaaggaaaaagctgcacacataggtacttattgctcttaattataatagaatattaagagagctttatttactgggaggagaatgggttaatattcaatagtgagaatgctattttaacttggtgagctgttaaacatttattaaaacttatatagatcacacagcaatatggaaaaatatgaaatgtcaagtgagtatactgcatttatggctttgttaaaacatggaaaatacaaaaaaaagaaggcaatatgaaaagaaaattaaagcctggaaaaggctaacacattttctttcaatatgtatttttaaagttttatcaaacaaaaatatagagaatttgtcacttaaaaaaactagtgccagtaaattgtaccacgtttttgtacaatagtagcaaaattgaattttaatttgtgttgtttttccttgatatgagagctataaattatatagctttttaagattctcaacaattaattgcaattttcattaaatatctcaaagtaattacaataaaaatgtttgaaataagataatatgggtctggcctttaaatgttgatatgttgaccaaggactgaaagaaatgtccagagcttcacagtttctgctgggttgggggtggagggatggtgggaggaatgtgaattgggattgtagaattggagttgagataagatcagttcgaaggaagagtttgtgttttttttatatctttgatggttttaatttatataataatctatttatatgttatatattgtaaatgaattatttaattcccgttagtgttctctgagccagattccaacttcagttctgtggtcaattgaaatactttagaatggataatctgctatgaaatactgaatccattttgcttcctctctcttgattttgaaaaataattgctcttttctgttacaagagactttgtggcaagtgagacagtttaagtaaaaacttaaaagataagtaaatcttttgctgtgtgtattaattttggcaagccttcttacttggggattagctttttgtttcatagagttctttaatatctattgaaattattttgtttgtttcttaaagcagtttttacagttatatattgttccgaattcatcatttagctttatatgtacatgccagttagagtcagaatgatgggaataaaatgatttcattctgtctgtattattccctagaggtttgtgttcaccagagtttctctctttttaccttttactatatattgaaactacaaatgaaagagctcaatttcttagcatttataaaataagtactccagtgttatgtttaccaaaaatgtttgagtgagtcttctctttgtctttctcttttttaaaaaattcaggctctgctggttcttcatcagttagatagcattgatttgtggaatcctgatgctcctgtagaaacattttgggagattaggtatatgtacttttattttttaaattcaacttttaaattttattttgtatttttgtcttgaaatattaactctgtagtacttagtacattgtaaaacttacacttccaaaggttttatggttttgtattttatttgacttcaaattattagaatttcttgttttaactgtaagaaaagtatcacagcaatttagaaaataaattttaagaatagtgctaaattttgtcaccctaacataagtactgttgtttggtatattacttttttcagatttcaatgtggttactactgtatttttaatagattttcatagttataagcctagaatgataaaattttgtaacaatactgttttttcagttttttgaactatgatctttcataaactttctgtaataccaatgctttcgatgaatgaattaataatggacacctgcttagaagaaaaaaatgtatgcagaattttgtggtctgcttcctagattatacaaatcattacattttaatgagcatgaagtcaccacacggaggaaaatgtaaatgtgtaaacctcaagtttgccattatcttataagaatgggtgtgctaagttacttggcagctgaattaaaccttactctagagtagtgctgtccactagtaatataatgagaaccccatatgttaaaaacttttttacttactacattaaagagtaaaaagaagcaggtaaaattaattgtaattatgttttgtttaacccggtgtatattatctataatttcaacatgtaatcaatataaaagttattaatgacatttcattctcttttttttaataaagtcttcaaactttggtgtgtcttttatacttacagcacatctcaatttgaacaagccacacttaaagtgctcaatagccacgtgtggctggctagtggctaccatgttagacagtgcagctctggagtagggatcaggaaacttttctctaaaaggccagatagtaaatattttagggcttgtgggtcatatagtttctgtcataaccattcagttctgcctttggagcatgaaagtggccacagacatgtgaatgaacgggcatggctgtgtttaactaaaactgtatatttacaatagcaagtgataggctaggtttggcctgtggatggtagcttgcagacccccactgtggagcactgggtttataggcagtctctgctgtgcatgtggtttattgtttcttcttatgtctactacaaggatgagatacatggatagaaacactgggagtttaatgaaacatagggggcttatagataaatacttgctttttttctataacctgtagacttatttcctttgattataatgctattgacactttgataactgtttctctaaaaccttacaagaaaaactaagcttctctaaacttgtattcattatgggagaatgccattcttatgtctggttatatctgcattaggttattgatgatgctagtaacaatgaactttatgttactgcagctcacaaatgcttttttacatctgcaagaaattaactagtcatcaaatgcttagtagcacagaaattctcaagtggttgcgggaaatattgatctgcaggaataaatttcttcttaaaaataaggtaagcaaaatgacatatttaaaaaatggaagaatatttggaatggtaatggtgagagattactaaagtgttttatagccaaattaggttctatttcagcttctccttcctcccaatgttctcaaaaggaaatatgtatgcagaggacaatgactggcaaatcagcattttaaaaattattctgaggctttggccttagaaccacactgttgatgaattctagttctagttgagttaaataggtctctatggggcaggcctaggaaaagtgggggctgctataaccagagtagcttgaggagcatattgtatctttactcttaagttcatacataagacataattcatacataaaatttattttaacatatagcttctgtaatttaagaattctattatggcgtagatttgggagtacttgatttaatgggtttttgtccagttctagaatcatagctctgagaaatcgtaaagacctagatctcatggctagactagtccagagaattatctatcaagaagcaaaagggaaacagttgagggtcctcaatctagatttatttcgattcctccaataagggtttcacctcttgaaaatatcaggagactttttcattggggtggagtgaaatgttttgattctgaactattgaaacatggtgaggttgtggaagatagagaagagccttaaatttcttttaacatatagtttctgtaattaatcaatttaggaattctgttatggcctagttttcggagtacttgatttaatgagtttttatctggtactagaagcatagctgtgaaagaccttaaatgtatgaaactcatatccttttcagtatttacagcttgttattaataaattgtctctttagaaatagactaatggtgaagtgggtttattcacatgtgacttatttgatatgttaatgtagtggaatttggcattattccaaagatacagaaagagattagacttcagactttcatggcctcgcctatggtataatctccagaatgtgagtatgaggaatccagtaatgaattcatagtgccctggtaggcatagtcactcttgtgacatacttggtgtatatacataccagagttaattactggtccagaagaacttaatctcaagagccaatttctggttatcccaacatggcacagtataaaatcttatggaaaaaaaatctttgtcattgagatcaaattatagttttcatacagtagatttatattgttgatgttttactcatgtttatgtcagacttaatttatatttgtagaatctactgtttctgatgatttagagaatgggaaactgaaagaaattttaaagaattaagtaaaccttgtttgttctaatgggtttctagtgaatctccttcaagttggggcatagagattgagaggagaggttttttaggagagtctcaaacaggaagacaactcaaataagtgtttattcctcttggttgtcagtgcttcagtaaagcttatttatttatttttttctagcaggcagatagaagttcctgtcactttctccttttttacggggtaggatgtgatattccttctagtggaaataccagtcaaatgtccatggatcatgaagaattactacgtactcctggagcctctctccggaagggaaaagggaactcctctatggtcagcttcttctgtactttttctgtatcattttatgtgctctgtttgttttctgaatgaaatttggtaaatttcatctaggtaatatagtgtaatagtgaaaaactgcttagaatctagttctattactgctctttgtggaactttgggcaagttcttaacatccttgttcctcagttcctcaactttaaaatggggacagtaatagttcctgccccagagttgttaaagagggttaaataaaaggatgtgtaaatagcacttgacacttacaagctatatctgataattataattattataaacctccactccataaaaaacccattcataccacagaagtatagaattcgtaccggctaacaaaggtacagatttacagggataaaaacaaagtattttgcttcatgttaaagataagtgtttctgtgatttgtgtttgtgtgtataatttcttttaaatataaatcatatttcaagtgaaaatatcacatcattacagaagagtttattttccaaaccaaaacttttttcattcctaatttttaatgcaaccttgttaaggaagaaacacctaagcagtatgatatttactaatgtctgttttacttgtagaatttgcatttattttatcaattattttctccatttcgtgtttggagaataagtaattcagaatcaaatgtatcttctacagcaatatttagttcttgtttatgcccttgtttcaatgagtgctgcagtgtacttattttattacttccctatagcaagtagatagaatttcctgttacttcctctttttttgtcatttctaattgactgggaggtacattatattgttactgcagtagatttacgttatggtgtttacctgtccatgttagaatcagtttacatttctggaatctggaataggataatatctatttgatttgaaattgaacagatggtagcattatgttggtccagataatctcatttctcatttggacaagatattttggggtttgaaaaattcctataatgattaaaggaaaaagctcttgtgagttattgtatgcggagacacacacacacacacacacacacacacacacacacacacagtttattgcattgttagattttatacataaaattacccaagttgcaaatatatgtcttccacccttgactctcaggatagtgcagcaggatgcagcggaacccccccgatttgccgacaagcccagaccaaactagaagtggccctgtacatgtttctgtggaaccctgacactgaagctgttctggttgccatgtcctgtttccgccacctctgtgaggaagcagatatccggtgtggggtggatgaagtgtcagtgcataacctcttgcccaactataacacattcatggagtttgcctctgtcagcaatatgatgtcaacaggtaaatgtgaatagtggttttttttactcagtctgcctcaaagcacatggcatctgattttgagaatgtatttaaggtcactactttgtaagtttacaggggaaattcaagtagcttacttgaaatccttttctgaacaaagtaagatgaaaataaaaagcatttgaaataaattgttagtcttccactgagttgttaatatgctatacattttaaaaataactggcagtagatgttactatcagttatgattatgtaatttactctgcctaagttgtagatagtgaagttttacaaacattggcgtatgttttgagtaaattgtaggtgggaatagctattttattctgtggacattgtagagtccaagataagtacctttcctgtgaggttagtgaaaggaagtttttggctttatcatttgaagcatttgctctgctcttcctactccttttgggtggagcttatcaggttctccattggcaggcagggctctaagtgcagtaacttgatttgctgttgtatttgcttaggaagagcagcacttcagaaaagagtgatggcactgctgaggcgcattgagcatcccactgcaggaaacactgaggtatgcccttagcaacagaaacacccctcccaggcgcccaccctcaatttggaagcctcttgttacatatgtgtgatcaggaatagcttttgaagtaaatccaagatacgtgcatattacaagtataatatctgagtatttaatatacatcaagtttgaaacttggctgtagctgattgatgtttagctctagactaagttgctttcaagtgataattgccttcattttaggcttgggaagatacacatgcaaaatgggaacaagcaacaaagctaatccttaactatccaaaagccaaaatggaagatggccaggtaagtctgtaaagttgacttttgtctgttaactgatctgctaaatatatgtacttcactttgataatctttcaagagtcgctcagtaaagtaaacatatagctgtgtgaagactgatatttagttgtggtttatctagacctgtactttgtaatgtggtagctactagctatgtgtgactatttaacttaaattttaacataattaaaattaaataaaatttagttcctcaatcatatagtaaccacatcgcaagtaccagtagccacatatgacaattacttactctattggacagcagagagagaaaatgttcctgtcatcacagaaatactgggcagcactgctagagactgtttgttgcagagaccatttctttaccttttcttgctctttctcccttcatcagggtgtttcacagaattttcagaaaaggagcaacagaggtagagataaattaacatggaaacaattcattttgctattttgttaggtattctaattaaggaatgtcttaggcagtagattgatcccatagagtaaatgaaattttaaaatgtggacagttcattcaactattactattgactatattatctgttactttggaaattaatgatcagttagtgtttgtgtgtatttgatttgtaatgttcatattgctctcattattaggtgatttataaaaactggttgttcctccatggtgtttttgtcatgcttaattacaataggaaaaagttatatttttacgaagcaaatgtgtgtacctaatacctttatttggaggggacatgtagctttagaatgaaagcttttggggggataactgttttatataattacataccatacagttcacccatttaaagtgtccaattcagtgactgtttttaatgtattcacagagttgtgcaaccatcaccacaatcaagttttagaacaatttcatcaattgagaaaaaaaccccgtaccctttagctatctctgcctctaaccaccccccacccactttcttgcctctcttcccccaacgtctctagccctaggcaaccatgaatctactttctgtctttgtagatttgcctattccggatatattctgtaaatggaattatagaatatgtgggcttttgtgattagcttctttcacttagcatgatgtttccaaggttcatccatgtgaaatcaaaactttttaaaagaaatttgacactcggctgattatattagtgtatgataaaaatagatcagtggctctttaaaaatgtatatggtaattttatgggttgattttaatgtatattttacattttttgtacttttgtcatggaagaaatgttggataaagcataatttgtcaagtctcaactaattaaggtttaattcatgctttgcacaaaaattttgtgtttaggctgctgaaagccttcacaagaccattgttaagaggcgaatgtcccatgtgagtggaggaggatccatagatttgtctgacacagactccctacaggaatggatcaacatgactggcttcctttgtgcccttgggggagtgtgcctccagcagagaagcaattctggcctggcaacctatagcccacccatgggtccagtcagtgaacgtaagggttctatgatttcagtgatgtcttcagagggaaacgcagatacacctgtcagcaaatttatggatcggctgttgtccttaatggtgtgtaaccatgagaaagtgggacttcaaatacggaccaatgttaaggatctggtgggtctagaattgagtcctgctctgtatccaatgctatttaacaaattgaagaataccatcagcaagttttttgactcccaaggacaggtaaagtgttctcttatttttcacctttctctatgaatagagtgacttgtttgaaataagcctttttctttcagattatttaaattaggtactcacagtttttaaaaatttccaaaaaattgcagaaagaagagtcatctcaatgtaggggtcagcttgcctcttaggaactctggtgtgtatgtgtgcctaagggtatacgtgccctgtgtatgggtacgagtgtctgcgtatatctgtatgcttatttggctctatgcctgtgggtgcacttactctgtgtgtttagatcagtcagtttcatctctctagggggtctgtcttctgggcattgatggcaaatcattaatgtatttgttctttctttaggttttattgactgataccaatactcaatttgtagaacaaaccatagctataatgaagaacttgctagataatcatactgaaggcagctctgaacatctagggcaagctagcattgaaacaatgatgttaaatctggtcaggtaagcattctactgaaatgtagcagaaacattttaagagataagaaaaacctcttacacactgatactggtagtaattgataaaataactggccattctttactgcacacaaactagggtgtgacagtaaggtagccagaagttgtgtacgttcttttctaaataaatatcttattgttttcaaacttacatttaattcgttttacttgatgactaaagtatttagaatgccttctcttttgtctatatctgataatttttttattgtttctatgtctatataggtatgttcgtgtgcttgggaatatggtccatgcaattcaaataaaaacgaaactgtgtcaattagttgaagtaatgatggcaaggagagatgacctctcattttgccaagagatgaaatttaggtgagttctcaaaagagcaatgtagggtcttgtaaatcttaatatgtccaatgaagtacagaaaaagagtagatatgcggttattggtagaaaggaggacatgaaaagagagcaatttacatgtttgtttttctctacatctcttctcaaatttccctaagctttgtgcctgtgacaatgctccctttttctaaaactgtgctatacttgagctaagaatttgattctatttccaatctgataccataactaagggccatgatggaggataaatatccatgttgcttgttcccttctggcttttatgtctgtgatagcagtatctcttttataaagtcgtcatgtcacttaggttatctggcaaattatttgcactataagaaatcttacgtgactaaaggtgtgtgtgtggcttcaaaaacattgtttgctgtttctcttttctccaccattctataggaataagatggtagaatacctgacagactgggttatgggaacatcaaaccaagcagcagatgatgatgtaaaatgtcttacaaggtaaaaaaagaatgaccttcaagtattagtgggttttactgtgagagttataactacttaattacagctttatacttgtattttgtgtgtatttaaacttttgagatgtcaaacttttgtgtttgaaatatgtaaagatgctaatctttattactgcttttttttgactgatagactttcagtaaaattaaatgtgaaagagtgatatgtttgggaagttagtgttgtcagtttatgaagaatagtctacagttattgggaaataagatacataaagcctcagattgcatttgtgttatgattagatagataaaggtattatttgaggaactcattgtgttgaatctttttaagaaataattgatttcctgattcaagcaccagagacagaaaaaaaaggaagtaatcaagtctgctttaatgatacttattgacacatatcagaaaatgattaaacactatggactgtataataagcattcacatatgtttctttgaccaagcctagctttataatacagtcttctctgtcagggattggttccaagaaccactccccaaacccctgcccacatcttactcccatgaacactaaaatccacagatgctcaagtccctgacttaagatgtcatagtatttgcatataaactatacacatcctcccatatatttttaattatcttcagattacttataatatctaatacaatataaatgttgtataaatatttgttataccatattgtttagggaataacaacaacaaaaaatctgtacatgttgagtacagatgaaaccctccttttttttcccccaaatattttcaatccatgggtggttgaatccatggatatagaactcactgatacagagggcccattgtacatgcttctgatttaaggtagccattttgccaagattactttgtagaaagtaagtattaccttctccccatttgagatgattttgtattctgggatctgcatattaactcaaattatttgggttgtgctaataatttgtttaatgaaataggtagttcctaaggtttatatctgttagtaagaggtttatttgaggggaagtgaaagaacttgaaagattcatggtctctaaattttttttttttttttttttttttttcagagatttggaccaggcaagcatggaagcagtagtttcacttctagctggtctccctctgcagcctgaagaaggagatggtgtggaattgatggaagccaaatcacagttatttcttaagtaaatttcagtcaccaaaaaacataaagcaaaaagcaaataaagccccccaccacacaaaaaaagcaaagaaataatacccatgacaggactaggataggaaaataactgtgttttgtgatttttttaaagaaagtaatatgatcagtgaaattttgcttataataaaacccagattgcttcattaagtcatttacaaaagtgacattgtctaagctgtttggaccactaattttatatactaacattaaaagtgacacatttaccaggtaatattgcatctatttgatgctaatgttatgaaaggtatactaggctatatcaggtaaaatcatgtccaacatagcacacttcataataagccaccctggctgattatcgcgagagaggagagaaacagttaacccagggccattcacaccatgcacatatgattgttttggaatgtctggttagctttctagttgatacggccttcactatgtaaaggtcagtctttttatttctcagatacttcacattatttatgaaccttttgaatgactgcagtgaagttgaagatgaaagtgcgcaaacaggtggcaggaaacgtggcatgtctcggaggctggcatcactgaggcactgtacggtccttgcaatgtcaaacttactcaatgccaacgtagacagtggtctcatgcactccataggtgagatcaaatgaaagtttcatatagaaatacaaaacctagagaactggcatgtaagagaagcaaaaattacttcagcaaggccatgttagtaaatttgcatctgtttgtccacattaggcttaggttaccacaaggatctccagacaagagctacatttatggaagttctgacaaaaatccttcaacaaggcacagaatttgacacacttgcagaaacagtattggctgatcggtttgagagattggtggaactggtcacaatgatgggtgatcaaggagaactccctatagcgatggctctggccaatgtggttccttgttctcagtgggtaagtgattagagtaagcggggaagaaaagtgcctggcacatagcaaatccttcagaatatatttgttcaataaatgtttgttgaatgaattgataaaatttcagagccagaagaaagatgtttagttaggtgatttttcagctgtagggaagtggttggcaccactagacctgactagtgttctgtatcatttcatcctactaaaaaattccatttaaacgcattaaaaatcactgatctactctggtgtcttcatatatttgataaggtaattaggttaaacctaattttagttagttgttgcaatgctggaattggaatccacgatttgtgcctgtttactacctccagtttgctattcttttccccataatgtctcatacagttttttaaaaatttaagcactatatttgcatttgatattatgatattgtttattttaaaaactgaaagcgtcatatggctatgtctctctcttaatttaatgaaaaattttcctaaaatcacatcattcttaatacatgctaaaacgttgagacgggttgttgttcctttccagtgttaaaaggctatttgctttttagtgtaccaaaactgatttcagttatagtaaattatgactaataaggtaatctgtccttgttaacaagcctgtatttgttatacctgtacttaaagtaaaattcaaactccttaccctgtcctacaaggctctacctgatctgggccctacctcatctctaacatcatcttatgctattttctttcttgttcaccagagccacaccagctacctttctgtccctccttgttagacttatttctgctttagagcacccttgctgctgccaccacctgaaatgcttctcttctggtattttattttggtgagaacacctggcatgagatctaccctctaacagatttttaagtgtataatacagtattgctgtctgtaggcacaatgctgcacagcagatctctagaacttaccttgtataactgaaattttatactcattgattagcaacagccccaaattattgaaacctccttgaagcctaaatttcagaaatgttcaaatgttttgaaaatggatattctgaattatcttattagcatctacctataattagcactgaaaatagtaattttttaaataaagaatcagttaagggccgggtgtggtcgctcacgcctgtaatcccagcactttgggaggctgaggcgggaggatcacaaggtcgggagatcgagaccatcctggctaacaccgtgaaaccctgtctctactaaaaaaatacaaaaaaatcagctgggcgtggtggcaggtgccaatagtcccagctacttgggaggctgaggcaggagaatggtgtgaacccaggagggttgcagtgagccaagatctcgccactgcactccagcctgggcgacagagcgagactctgtctcaaaaaaaaaaaaaaaaaaaaaaaaaagaatcatttagttcaagtagctttaattcgttgagttttatattaaatgactttgagaaggaattttctgttaggccagatctcacctaccacattattgtaatccttggatcaggcaagaattagagagctatgagccatgatcctggcctttgttgttactgcttgaggattgaggcatctttttatggctacccctattatctataaatttcttcttatcatgtgattaaacagtgatttaccattagatcattttttcttgagtgtaccccaaactgttttactacagagagttataaaggatgtcatttaggtaatagatagaaatttcagccctcatccttgtgaccctagctttgtatgtaaatctggctcatctctgggttctgaatgcccaattccttttcttcctggtttctcaaaaatcctatagtctttctgtttttgttgtgtctctgcctagtatatattcagtattcgctgagttccccgactgtatgagaagagagtagaactcttctgatcatcaatcttatttctgctctgtgcaaatgcttgtacaaatcaaactaaattctttgctgtcatcttctgtttctgctctctttcattttgtgatgtaatttgagctgaatcttggagattttgtctcctagtaaagcgtaggcctctcttaatagcttttaccggttaatccttggaattaacagctatcatagacattgtatatagtcatctatcataaacaatgtacactgttaaatctcaggataaatattaatcagtcatcatttgccttaatttagcaagtggttgtcaactttgggtttacatttttgctactctttagcttcctacctaagaataaaaatgggattgtttgcactaacctgattttgttttgttctcaggatgaactagctcgagttctggttactctgtttgattctcggcatttactctaccaactgctctggaacatgttttctaaagaagtagaattggcagactccatgcagactctcttccgaggcaacagcttggccagtaaaataatgacattctgtttcaaggtttgtatcattcattttgtgtgtatgtgtgtgctgaggtatgtcaagtaatgattatgtacagaatgtgcagggctgattgtcttcttttaaggtaaaatatatggagcaggtataataaactcctattcgtgcatttctgtaggtatatggtgctacctatctacaaaaactcctggatcctttattacgaattgtgatcacatcctctgattggcaacatgttagctttgaagtggatcctaccaggtttgtcatcttttcacatagaaccgctgttttttgtttttttttttttgtttgtttgttttactaacactgcatgaagcaaggcaccttctccccttgatcattaaaattagtttttaattataaaagttatatacaaatacacgtttctttaatgatatctgtaatttttttttaaggtatccttttatttgccttagatccagggacaaactagagaaaggtgtctttgacttccacctccagagactgttactagttaagtctgttcccctgtcctttttccatgcatttacatattcatatgcagtcacttgcatgcatactctttttctaactcacttcttctatgatgaggagtgacttaggagaagggaaagaggctaataggtaatgcaggctgcagtttatttatttgtcatttttttaaaaatttgagacagagtctcactctgccattcaggctggggtgcactggcgcagtctcggctcactgcaacctctgcctcccaggttcgtgtgattctcctgcctcagcctcctgagtagctgggattacaggtgtgcgccaccacgcccaggtaattttttttttttttttgtatttttaatagagatggtgtttcaccatcttggccaggctggtctcaaactcctgacctcaggtgatccgcctgccctggcctccaaaaatactgggattacaggtgtgagccaccatgcccagcccagagtgcagtttaaaccaccatttctgtgaagctttctctgcttgttaccaggtactacccacgaacaaagaaatatgctttgttctgtgctgtgcaccaccattgtaacaattgtgacgatttatgagtttctctctcctctagactgtttgctcttttacatttttacatctttatatccttccatgaatatttagcatggtgtctgccttatagtgaacattttataaatatttgttaagtgaatgaattttaacggaatatcttatgcttgctttttctaagccacatgttaagatgttcttgtctgtctttcagttaggactttattttttacttttaagttcagagcttcttgatgattgttcttcctaaataatcattatttagcaactgtgtatcagttgatatttttggctctgcatttgctgaagtatcaactgtaatatctattcagaactccagcactaagccaatttttgttaaaatagttaaaaacttaaaagcaatttttatatttttatttacttcttattttttgaaatggggtctcactctgtcacccaggctggagtgcggtggcaccatctcggctcactgcaaccttcctgtgcaggactcaagcgattctcccatctcagcctcccaagtagctgggattacaggcatgcaccaccatgcaaaatacaaaatttttgtattttggtagagacgaggttttgccttgttgcccaggctggtctcaaactcctagactaaagagatccacatgctgtggcctcccaaagtgctgggattacagatgtgagccaccacgcctggccaaagcaatgttttgtaaagccttgtattttcttgccattaagcactttcagtttttttcttgacaacttctcatgtctactttttttttttttttttgcaattttcaagtgtacataatacattattacggattttatgttaattttgtgccctacaattttactgaatcttattattaagcaattttactttctaaaggttaaagaattacttagagagtgaaccagctgcttcaaataagtttactatacaaagtgctgtggtccagataagagaactagatggcaaacaatatactcaggttgcttaaaatcaaactgaggcccactctgacatgtcaagagcttgaaagtcaacactcctgtgttcacaacatgaaaaaagctaaaaaactgaaaatcagcagctcttagatccatcagagaatttaagtccactccaaaaactggagagacaggtaaatgtatacagagaatcacagtttaccaggagaagaagctgctggagccagtaactggtaggaaagcttagatcataattgacgagttgctggaggctgagcatggagtgcctagagagttaaaactcctaggggcctagtcttgcagggacccctgcacctttgtaagttttacctccagaagcctcatcaggctctcatggtgaagataggagaaaaatccctttatgctttgggcaggggaaggggaaaagtagccatttttaaatatgaccacagtgttctgttatccctagcaaaggtttgccctcaggagaaattactttaccagagctttatttgacttagaagttagccacctccagccccctctagcgtttctgtaagaagagagaaaaggctaagaaactctttgagtctggcctggtggctcacatctgtaatcccagcactttgggaggctgaggtgggcagatcacgaagtcaggagatcgagaccatactgtctaacatggtgaaaccctgtctttactaaaaatacaaaaaattagctgggtgtggtggcacgtgcctgtagtcccagctaccaggaggctgaggcaggagaatcgcttgaacccaggaggtggaggttgcagtgagctgagatttgcaccactgcactccagcctgggcgacagagcgagactctgtctaaaaaaaaaaaaaaaagaaactctttgaaggtcacactttaaggaatttggcccaataaaacaatggagatataatcagattgtagagtacttcccttccccagtatcccagttaacggggaaacccagggacaacaaaagagacagaaataagagcactagaggaaatgggcgcctacagttacagcgaacattaaacataacctaacttctaggcagattaacagaatgcctcacactaaagtccaatttacctcagttcctatgacccaatacatcttgtctggctttcaacaaaacattacaatgcatgctaacaaaaaatgaaaaattagtctgaggagacaaagcaagcatcagaatcagactcagatgtggcaagatgtattggaactttgaaattgtcaaactgagagtttaaaataactaatatgctaagggctttcatggaaaatggacagtgtgtaagaacagatgggtaatgtaagcagagacatggaaattaagaaagaatcaaaagagaaggctagagaaaaaagctgtaacagggagaattcctttagtgggcttatcagtagtctgggcaccactgaagaaagaattggtgaatttgtagttatatcaagagaaacttcccaaactgaaatgcaaagacaaacagaagaataaatgaaaatgaaaatacatcaaaatttgtggggtttaataaaagcagttgcttagcagtgttaaatgtatgttagaaaagaaaatctaaaatgaattatctgagctctcaccttagaaaactagacaaagagcaatacctaaagcaagatggggggaggaatcagaaatcaatgaaattaaaaataggaaaaaaataatgaaacgcaaagctagatctttttattttttaatttttatttttttgtgggtacatagtaggtgtttatatttatggggtacatgaaatattttgatacagacatggaatgtgtagtaatcacttcagggtaaatggggtgtccatcacctcaagcattgatcctttcttttttcttttttgagacagagtttcactcttgtcgcccaggctggaatgcagtggtgctatcttggctcactgcaacctccgcctcccatgttcaagcaattctccttgcctcagcctcccgagtagctgggattacaggtgcccaccaccatgcctggctaatttttgtatttttagtagagacagggtttcacaatattggccaggctagtcttgacctcctgacttcaggcgagccgcctgtcttggcctcccaaagtgctgtgattacaggcgtcagccaccgtgcccggcctatcgtttctttatgttacatacaatccaattatactcttttagtgatttttaaatgtacaataagttcttgttgactgtagtcaccttgtgctatcagataaccagatctcatttatattcttttgtacacattaaccatccccggtctccccttccccaccccccactacacttcccagcctctgggtaactatcattctactctctatctccatgagttcaattgttttaatttttttagcttccacaaataagagagcgcacgatgttgtatttctttgcctggcttatttcacttaacatcataaccttcagttccatccgtgttgttgcaaatgacaggaatctcatgttttgtgtctgaatagtactccgttgtgtatatgtaccacagtttctttatccattcttctgtggacagacacttaggttgcttccaaatgtaggctattgtgaatagtgctgcaacaaacatgggagtgccgatatgtcttcaatatactgatttccttttgtttcagtatatacctagtagtgagatttctggatcatatagtagttttatttttagttttttgaggaacctccaaatggtcctccatagtattatactaatttacattcctgccaatagtgtatgagggttcccttttctcacttttctccttgtcaccatttgttattgcccgtcttttggataaaagcaactttagggtgatgtgatatctcattgtagttttgatttgcatttctctgataatcagtgatgttgagcaccttttcatgtacctgtttgccatgtgtattttgtttgtgtgtttgtttgttttgagacacagtcttgctctgtcacacaggttggagtgtagtggcgtgatcttggctcactgcaacctctgcctcctgggttcaagtgattctcctgccacagcctcctgagtagctgggattacaggtgcctgccacgatgcccagctgatttttgtatttttagtagagacagggtttcaccacgttggtcaggctggtcccaaactcctgacctcaagcaatccacccgcctcggtctcccaaagtgctgagattacaggcatgagctaccatgcccagccatggaatatcttttttctttgctttattttcagtctgtgtttttccttatagatgatgtctgtttcttgtaggcaacagattgttgggtcatgggttatttttgtttgtttttaatccattcaatcactcttacgtcttttgattggagaatttagtccatttacattcagtgttattattgacgaggacttactcctgctattttgttatttgttttctggtggttttgtggtcttctcttcctccttttcttccttcctgccttccctttagtaaaagtgattttcacagatgatatgtgttaatttcttgctttttattttttgtgcatctgttgtatgtttttgatttgaggttaccatgaggcttgccaataatattttatgagccattcttttaagctgatgacaagttaacactgatggcataaagcagcaaacaaagaagcaaaaagaaaactaataaaaactctacactttaactttatccccctactttttaactttttgttgtttttatgtataccttattatactgtctgtatcttgaaaagctgtagttatttgtaaaaggttcatcttttagtcttctcaagatagtagttcataccacaattacagtgttataatattttgtgtatttactgttaccagtgaattttgtaccttcagatttcttattgcttgttaatgtccttttccttttgattgaagaactccctttagcatttcttctaggacaggtctggcattgataaaatccctcagcttttgtttgtctaggaaagtctttatttctccatatatgaaggatattttcactggatactgttctaaggtaaaagttttttttttttctttatcacttgaaatatgtcatgccactctctcctggcctctaaggtttccactgagaagtctggggccagacatattggagctccattgtatgttatttgtttctttcctcttgctgcttttaggatcctttctttatccttgacctttgggagtctgattattaaataccttgagttaatcttctttggtttaaatctgtttggtgttctgtaaccttcctggacttgaatattgataaatatctttccctaggtttcataagttctctttttttttttttttttttttttttttgagatggaggttcactcttgtcgcccaggctgcagtgcaatggtgcaacctctgctcactgcaccctccgcctctacctcctctttaaggccagtaactcttaaatttgctcttttgaggctgttttctagatcttgtaagcatgcttcattctttattcttgtctcctctgtgtattttcatataggctgccttcaagcttgctaattcttctgcttcatcaattttgcttttaagagactcttgatgcatatttcagtatgtcagctgcatttttcgtctccagaatttctctctggttctttgtaattgtttcaatctcttcgttaaatttatctgataggattccgaattccttctccacattatcatggatttccttgagcttcctcaaaacagctattttgactcctcggtctgagaggtcacatatcgctgtctctccaggattgatcactggtgccttctttaattccttcggtgggtcatgtttttctggatggtcttgatgcttatggatgttcattagtgcctgggcattgaagagttaggtatttttgtagtctttgtagtctgggcttgtttgtacccacccttctggggaaggctttccaagtatttgaaggcacttgggtgttgttatcttaagtctttggtcactgcagctatatctgctttaggggacactccaagcccaataacgctgtggctcttgtacactcatagcggtaccaccttggtggtcttgcataagatcctggagaattccctgggttatcaaacagactcttgttctcttcttctcttcccttactttcctctaaacaaacagagtcagtctctctctctgtctgtgtgtgtgtgtgtgtgtgtgtgtgtgttgagctgcctggagctgggggaggggcgacacaagcagccctgtggacaccagcactgggagtgcactgggtcttgcccaaggcctgcagtactgctgcctgactaccacctatgttcactcaaggcccaaaggctctacagtcagcaggtagcaaacccagccaggcttgcgtcctttcgttcaggcagtgagttctccgtgggtccagagatgccattcaggagccagagcctagagttgggtacatcagagatctacctagtgctctattctgctgcggctaagcattaagctggcacccaagctgtaagacaaagtccttcccgctcttccgtcctcttttctcaagcagaggagtcttttcccatggccgccatcgccccaggcccatggtgagtgctgcctggctaccactgatgttcactcaaggcccaagggctcttcattcagctcatggtgaatgctgccagttctgagtctctcccttaaggccttggggctcccctctaacccagggcaggtccaggaaagttttccaggagccaaggcctggaatctgggaccccaggagcctacttagtgccctaccccactgtgtcaagctggtacccaagttgcaacacagagtcccctttattcttacctcttctttcctcaagcagaaggggtctctctccatagccaccacagttggtaatgtgctgggtcacccctgaagccagcatgtctccaagtctcacccaaggcccacagcaagtactgcctggctatccctcctggttgttcaggggccaagggctctttagtcagcaggtgatgagttctgccaagactgggtccttccttttaagacagcagatttccttctggcccagggtttgtttaggagtgttgtctgtgaggtagggcctgaaatgggggcctcaggactctgcctggtgccctctcctactgtggctaagctggtagttacaagacaaggtcctctttactctctccactcttgtatttgaacagagggaaggcatctctgttggagctacaagctgagctgagctgcctgggtttgggagaggggtgatgtaagcattcccttggttgccctggctgtctcactaggtccaccccaagtccactggctctgagcccagcacagcaccaggacttacccagaaactgcagtccttgtgggcctagactgcctttcaagtttatttaggacctcagggcactttagctcttggtggtggggcttgctggaactcaggtttcaacagctgggatgggtgatttacctctggctaggtctgttctaagttctccatccttgagcaccagctgagctctgccctgtgttgctttctgctatgacagggcagcatttagtcctaatgcaaagtcccataatcactgtgctgtccgtcccccaaatgcagattttctttgcacaccacggggccactgccaggaggtgaaggaagggtggtataggtaagtcaagacagtttttcctacccgcttcagtgcctcttccttaatatgatgttaagaccaggtattgtgatcacttacctgattttcagttcttatgaaggtgcttttttgtatggatggttgttcaagttggtgttccaataagggggacgatccctggaggcctccattcagccatcttgctccacctccagttctcaagctagttctttgaaaatcaacttgggaaaagttttatacacaggaacacttgaataattgaacacaaatgttcattgtagttcagaattagtagaatattcaacaggttaccattggcatgtgggaagcaagagagcactgtggctagaaggtattgttttagagggaaacctgaaatggactgcagtgtacctgctgctatgctgactcaaaaaaaaaatttcacaaagtaggcaattgtcagggtttctagcagtctctttgagccttgttaaagaaattgttaatctcattcatacctaccaactcctagacctccatatcttaagatttggattactgttgtagcttaactgttctccctgcatataatccccatatttaggctgtctcttcaattagccacatattgcaagttcattttcctcctctggcttcctaacaaccatcagccattctccaatagataccaaccaggtgtccttgtgattcagttcaaccgtgacactgtttacctggagagagcatcagatttcccataggataagggctgagtaagattgctaccacttcagatgccaattacaagccccaggttgttacctgtgcttctcacaacttcaccttgagttggattaatttgctagaaggactcacagaactcaggggcatactttacttttgtttgcctacttactataaaggatatcagaaaggatacagatgaacagccagatggaaaagatgcacatagggcaaggcatgtgggaaggggcttgcagcttccatgctgtctccaggtgcactaccctccaggcacctctatgtgttcggcaacctggaagctcttcaaactctgttcgttgggtttttatggtgacctcattatataggcatgattgattaaatcatgggtcattggtgataaactcaccttcagcctctctcctctccttggaggttggggagtggggctgaaagtctcaaccctctaatcgaaacttggtctttctggtgactagccccgtcttgaagctccctaggacctcccagccaccagtcatctcattatcatataaaagacactcagcacttccagagattccaagggttttaagagcaatgtatcaggaatcaggagcagagaccaaatatatatttatcacaatacccttgaattattgtattgagtacttagtgtggaatacctggtctatatgtctttctcctttttgaaaaggtcaaaaggcaattgttgaatcctcagcacctgatactaagatggcagatagtagatgtgcactaaatatttattggattgattacctgccgcacctactttctctttctgaaatacccttacttcttttgtctatgcaaattctgtgcctcctttagaactcacctgttcaatgaagtatttcttgctttgcagtccatgctaatttctgaactcttactgtattcatatgctgtgccacacagcaaactctaaggaatctacagcaatgacgtaagtgtccaaagcatttctgtaatacgttaattaatatagaaacaaaattactaattaacctgttaaaaacaaatatttactcagtacttgctgtggtaaggcactgtgctagtctttaaggggacataggtaaatacttccttcaaggagcttacagtttagtaagagggataaaacacacaacagataagtggtgagtttcataaggggtgtattttgagagttcagattaggctagttagagagtaaaggtttgtggatttgattactattgggtaaaatttaaactacataaagtaggcattattagtcctgtattattgatgagaaaaaatgacacccagagaatttaaggattgtgaccaactcataatgattgataactgatagagctgaaatttaaacctagtaagtctgcctgcggaatctcttcctttaatcacaacatcagagtttagaggtggtactgataagagttagcaacactgggccgggcacggtggctcatgaccgtaatcccagcactttgggaggctgaggtgggcagatcataaggtcaagagatctagaccatgccggccaacatggtgaaaccttgtctctactaaaaatacaaaaattacctgggcgtggtggtggtgcgcctgtagtcccatctacttgggaggctgaggcaggagaattgcttgaacctggaggcggaggttgcagtgagccgagattgtgccactgcactccagcccggcaacagagcaagactccatctcaaaaaaaaaaaaaaaaaagcaatactgattggatatggggaataatgaagtagagcaggaaaaagtgacatcagagatggcctgaatgatgtgattaagaaagtgatagtgctattgataacatagagcacatgataagacataagagtacgaggaaaaatcagttaatttggggcatactgatttttagataccagtggggaggggacatctagcagttagaaatgtcagactggatgtgaaatgcagttcaagataggggaaacctgaatggccacaaaatatctaaaagcatgtctaaccttagtaggaactgtggaaatagaagttaaaaacatgagctacctcatgttttactcaactgctagattggaggggaataagaattcttatacagtactagttttagagctatttggcaatatctagtaaagttatatctgcatatactcaataactcagaaatttcatttttaggtagctgccttagagaatctcttatgtgcaagaatgttcattgcaatggtgtttgtaaaggtgaaaaatgtttaatgttcattataattagagaatagataaatcatggtatacaatagactattatgcagtaaagtgaactatatcttcatctatcaacatggataaatctcagaaacataatgtagagtgaaagatgaaagttgccttttgttactattgatgaaaaaagtaaagacctacatcattcagccgggcgtggtggcttatgcctgtaatcccagcactttaggaggccgaggcaggtgggtcacttgaagtcgggagtttgagaccagcctgaccaacatggtgaaaccctgtctctactaaaaatataaaattagccgggcgtggtggcccatgcctgtaatcctaactacttgggaggctgaggcaggagaatcacttgaacccgggaggcggaggttgcagtgaactgagattgcgccatcacactccagcctgggcaacgagagtgaaactccatcccccgcccccaccccccaccaaaaaaaaaaaacacctgcatcattcatatgtgtgtgttaattttttcatatgggcatatacacatagaggattgtgaattggaaaaatacatgatattcttgttttatctgtcccctctctcccccttttgttgcttgggtattttaaagcatatctcagagatcatgtttctaacatatacagacttaaacacacatacacgtgcatgtgcagcctgagtatttccacacaaattaaagttaataatcctgaataatatatctaagactagttttctgttaaatttttttcagttatctcaaagttgtctttttttttatttttatttttgagattcagtcttgccctttcatccaagctggagtgcagtggtgcagtcttggctcactgcagcctccacctcccaggttcaagtgattctcctgcctcagcctcctgagtagctgggattacaggcacctgactaatttttgtatttttagtagagatggggtttcaccatgttggccaggctggtcttgaactcctgacctcaaatgatctgtcagccttggcctcccaaagtactgggattgcaggcgtaagccatccagccctgtcaaagttgtcttttttttttttatagttggttgtttaaagattccaatgaagtctacacgttgcacttggcttaatgtctgtataagagtctcttttaaggagtgatttttgttatttgttttaaacaaaagtgttaggattttatttttatttttttgtaggttagaaccatcagagagccttgaggaaaaccagcggaacctccttcagatgactgaaaagttcttccatgccatcatcagttcctcctcagaattcccccctcaacttcgaagtgtgtgccactgtttataccaggtatgcttacagttagagattaccattattaatctaaagttaaattatgaagaatgctttatcaaagaaggatctagctgctgatggtgtgtggttaactataatactgagtcagtttggatgaataatacattgagaattgttggaattgtctttgaaaaaaacttaaatattacttaggcaacagtttgaagtaagagaatactttaaaatactaaattttacttgcattgggagcaagtttaaaatgcagtgaatccattgggtatgatggatgtggctgaaatgaacatattatggatttttgttgttgtcatctattaacctaaattatttacagggtgtttcacagttgaggcgggtctcctccttgctttttgcattgtgaattgcttgatcatctgtgattttggtttcttcattaatgtataattagtttgtgtcaggttttcccaggatagactgattgttctgtttactttatgtagcatatttcttaaaagagatactgcatcatcattcagaccaaattattagaccttctaacactagcactgcaagtaatgcgtctgaactcagaaaatagccatagtcatggccttcttttttagggaattcggtctatgttcttttatgtcttctactgtgtttttgaattgcacattgcagttttaggaattatttattccaagggaggtcctgcaaatgcatattagccttttggaaactgtgattctggaagaaacattagtgggtctggaatttgggataggggtggatataagggaaatacacagttatcaaaacccatgtctttgtgtctctctctttgcagagtcatcgcagccatttgcttttttagcacacggcttcagttgcttagagacgttaacagcatcattgaaatcaccattttaaaagctgtttgaggctgctctatgtgaattttttcaccattgctatttttaaagatgtatctgttctatctgtaaaaaagcttttcacggtatacatagatgataaaacatacttaaccttgtctctcttaatttatcatgacttttctgcctttacaaaaaggctcaaggaaacttaggaaaatcctgtatagttttttcaactagttaagtctgagtctaaagggtagtttagttataatatgaaacttaatacagtgaatatcttctcaagtttgggctgtattcaggtttctctttaaattttatttagtaattgttctattgatgaaactaggcagacaggaaatagcacatattaaaaatagtctgggtcagcttcttggttggcctagtagtaactggtttcagagagcaagtgggtttctaaaatgacagaggctttgactttagctggttaaaagtgaatggggactgactacatgattacatggtctaggagattgtagtagaatttcttcatgtggttgtcatcctaaaagaaaaatctttttgtatcatgagcaaagttggagaccgttttgagaccatgattctaataatgtaaaaggaacaggtcttagcacttatttagtacttaggaaatatttaatgaagaaataaatttcccatccctcccacctaagtaaacaagattcttgccagctttcacagctaagaaaggaggaaaatagtgaaaatagatttttaaacactatatgtggtgattattaaacagtatgttatgctttttagagcacttcacagtaaaatatcctatattattttaataacaaacctggtttattatgttaaaatttcacataaaattattatctttaaaaacatgaattaaaggtggtatcagtgcattgtttaagtattgggtaaaagcattgttgaagagcagagacagcatgctgtgttgttattaaataaggctttattttttaattagtaactggtaacagggaatgttacatttactgattagaaagaaagataggaaaaaagctttggtctcaagatagtattttattgagtctgcttcccaaacctagtttatttcttttggtttgctcttttgtttttattcatcttccctcttctggctttttcttgcccctttgcctttggcagtaacagaaaggtaccttcctgctcttctgtgttctgcctggagggatagtagtccctttgggacctactggggaaatgttgaaagggaagtgagtatattgctagctaataaacttccctggactttagctccttttttgagttcatatcttggcctttaagccttttcaaatcatgtgttaaccagctctattactttatataccttccttccttagttgactggattaaggttatttaagaatagccaactgtgaacatgtgtcagatttataattaaatcattttctcatgtgttgttttcacttctcctgatggttttaggataaagataaaatgattcccaaagtggatattctcgtatggtgagagaattctaagaactaatttatgattctaaataaatctcaccctttttcagtaaatctgcttctccaaactgaagtagtttacacacagttttaaggctataaatgatagttatataccactgttactaatacatttgtatatagtctaaagtttgaaacaaagctctgtgagctaaggggctgtgtcttgttgttttactgctatttcccaatgcctagaatggtatttgacctgtaggtacacagtaactctttggatggatgaatgggtgggtggatgaatggatgtctaactaacttaaagcccaagttatgggttatggtgttggatgtccagaattcccagaataagatgccatctatttgtggattaaataattctaacatggttttaaaaatatttttaaaataattattctgcctaggctagtccaatcaagagtcttttaattttgaaagaaatctttggtctagaaagagctctgagagatgaaaccaatatgtgcctggagttttgggggttttttaggtggctttttttttttttttttttaagatattttgataaatggtcaactgtaatatgtgaaaagttttaagcaggcctacagttttgttctgtaattttctctgcagtttcttcactttaataatattaatgcttcttactagttgagctgataaccttcttctcccaaatgttgcagagcttttaacctcctctgattagaaccatttcaggaagtagcctgcaaacattgaaaaatatgtgaaatgttaagagtaatcttttttagagagagaggtctttaattcagaatttctaaagtgaatttttatatttatccatataatttttatttctttattcagtaggatcataattaaatgccaggtgttggaaaaagaacttaaagtcaattgaaggatacacagagaagaattttacataccaagaaaaaattatgtagacacaaatgtttttagtgtgtgatctacttgtaatgaatattttatattacatttctcaaaagctaggaattaaccaaaatgtaaatatttaatatcctcaaattcacttggagagagtttttctgtgattcatagccagaaatagtagacatgattgggtctcaacatttcttgctgttttagtgcttggcttaaaaatgtaataaaaattaaaacccagaattaaaattcattcctcaaaattcagttgatttctaattttttgttgattccatttgtgttacattttatggtgtaattttatgtacaagccaacattgtttttgttgctgtatgtagtcggtgctgtgacttgtttgtgctcatctctgttctgtaggcaacttgccactccctactgaataaagctacagtaaaagaaaaaaaggaaaacaaaaaatcagtaagtttggagaactttttattagctgtttctttcaaagcaaaacaaaaatcttttgctgtttgttaagaatatcttcacttcagcctatttgaccttcactgtaaaatcattctactaattctggcacaaaatagctttcatttcaattaaccctggaattaagttacattgaaacattctctgtgttcctttggtttgatttatcccaaaggcaatttgtgggcatttgttgcattggatatccttggtctaattttattattgttactttttaaattataaatgaatgcaaagaaacttaatttcaaggccttaggaaacgctgactgtcttcattcttgcttcttgtttgaaggtaatgtgagtggtttcttttcccagagatgacagtgtttcttaattgttagaagtatatggtgggaaagagtcactttctaaatcttacctaaaagttgctaaattttatttttttactcttcatatttttatctaggcagtctcaggcataatttagatatttgtgcatagattatagaaattttaatggtaaaactacttttacctcaaaaaaataagaggtaaatgataagatagtacttttgagataaaagaaaactgagttcatatttgtagaaaaacacatcattctgcaaacataatgtgaatatactatctgcttctatgaacttgccttgatttatttaaaaggaagaaaattatgagagtcgtaattattttcttccagtgaatggaatttgtccaaaatataatatgcattcattttacatttgccattatctgtcacagtgacttatcaggctgagccctgtctttgttcatataatccaaatgattgtagagtaagatgtaaagaaaactaagtaggtagttttcttaaaagggtgtaatttagaatacagtgttcatctggtttcatctttcatgccttatctaaactttacatataataaaagctttatggctgggcacagtggctcatacctgtaatccgggcactttgggagaccaaggtgggagtatctcttgagcccaagagttaaagaccagcttgggcaacatagcgagtcgtctctacaaataatttttttttttttttaattagccaggcgtggtggtgtactcctgtagtcccagctactcgggaggctgaggcaggaggattgcttgagcccaggtggttgaggctgcagtgagctgtgattgtatcactgtactccaccatgagtgacagagtaagaccctgtctcacaaaaaaaaaaaaaaaaaaagaaaacgaaaaagctttacatataagtttctaagctgtacatataaattatctaagctttaaatatagatttttaaaattcaaatcaaaatttaaatttatagacatatacttttgttgtgtccattgaagattttatttttgattatattaagtaaatttgcctagctatgatcaaattgattggattataaagacgtttctaatgcttcagccttctaattctcagcatatgtgagtttaacataatgtacaccatcattgttgaaattaatttgctgcttctaacactcttgttcagtgttatactaatgccattttgtagtgtatcacataattaaaattcaggctttctgtgtttctctagagcatgttttctagcctttctaacactgctttatttattaagattatgtctaaaattgtttcttgaaatgtttttttttctactagagttattttcaaaaaatttttttttaatttctgggtaacaccaagttttggaatgtatttctcagcacaggtaatacgagctcctcatggaaacaaggggaatctaattggtaattcgagatattttagagtacattccaaagtatgaagacagtatactcataaatttaaaatgttgttttatggagttgtgtgctttaacaaaacctaatgatatttaagagcaagctgactttctttttgggtgtatatgtcatggattggaatatgtaaaatatagagagaagatctggcttctagtatatagctgtgtagtcacattacaaataactgtttattattctcaaatatatagtgtataatgaggtttactttgaaagttaactgtctgcctaactcagggagaatgcagtaactaagcatatatgggtagtaatgctcttgctgaagtgtagtttatgactacatgcattcgcgttatgtagtcagcttttaccaagggaagaaagggtacatttggctgataactggtctcaacacacagactggcccaagtttgaccttttatgcagaatgtcttttggatccaaattagatttttatggattaaaaaaaacactagagcatgtatgtattatgaggtaaaattacattgatgtcaattagtggtgaatgaaaaaaaaacagtccttttataagttgacttacgaaacttgttatgtagcatttttattggtttttaaaatcagtttttagttccaaaattatattgattctgccatcagtgatacatatatttatatgatacatgagacagtatgtgttcctgaggtgtcgatattttgggttttgacatgaattatttttaaagatgtggaagatggtaaaagtgtagtacttttcataaagtttacaatatgcttttgggaaatcactcagtttttcattaaattctgaggctgagtaccattaaatcaggtgtaaatatgagtcacattttaaaacttctttgtcctagagaaaaccggtaaatagctactttcaaagaagtattttgtctaattgatgataaccattacaaatttccttgttccttctccactcccagtgcttcattttactagcataaaaaataaaacagtattttgaaagctctccatgtgtttcacagcaggttaacattttataaactaactggttctttgaaaattaaactatgggttttagttttgtaaaaacttttagaattttaatgagttaaacgtatgagatgctaattcttttaaaataatctattttaaaataattataaagcagtttttaatccttttccctcctgctaactcactccttaaaggctttaaaatgttataggtttcttttgtctgcctttatttatttatttatttatttattttgagacagtctctctgtcacccagattggagtgcagtggcacgatggctcactgcaacctccacctcctgggtttaagcgattctcctgccttagccttccaagtagctgggattacaggtgtggctccaccatgtccagctaatttttgtatttttagtagagatggggttttgccatgttggccaggctggtttcgaactcctagcctcaagtgatctgcccgcctcggcctcccagagtgctgggattacaggcatgagccaccacgcccagccagagaattgtctaagattaaaatttgggagttttagaaaaccactcagtagcaatgatggtctatgaatattctaaaattatgtgaagaattttgtgtgtgtgaatgcatacattcatttttctaacctttatcagatttcaaagaggttcctcgtccccagaaggttcaacaccgtactggaatagtcaaagcactggaattttttcttaattttacatctttctatagttttagctaaaacttctgtatctaattctaaatgtatatatttgagctaaaaataaatggtatttaggttttaaagccattctaataaagcagctatatttagtcaccttcaccagtttccccttatttaagggttaaggttgttcttcatgcaataaacactgtaacataaagaaagcttcctgaactatgtgtagtgtaactgaagatggaactatattagttacaactgacctctttttatcacctcttacaaatattttctctaaaatctagtttttactaacttcctgttagagattatagaaagctattttgaggttataagcagtgataacacatttaaaatgtggactgcatgaagcactacattgaacaagatgaagtgaaataatccccattttttccagagttaatctggagtcagcctgtcataatttgtgtcataatttcctgtcataaattatgacaggaaatatttattgaagcattgtgaaaaaaatagctacgtgatattccgcatgtaaatctgggtcccctcccaccaatatcctttgaaatgaaggtttatccttgacatcacagaatattgagtggaatgctacagttttgtagtcactgctactttaaacagcagtttagccgcactaagcaagaatagctgtagagattaaaatgttacattaagtgttctttaaaaatgaacatatatagtatatataaaaatgtaaactgcaaaatataattttcatctatgacatgatttaaagcaggggactctggaaagggatgggagctgaaccagttttatagcactcttcccgagctaaggtacctttttatcttaatgtagaatgttttataaagggaaaatcatccattttaaatattgggttcacattgcttttcaggctggacaaccatttcttgagttcttaaattatttttatttgacagaattataaattgaggtagacataggggttctctcttctggtgagatccttttttcttttaggtccccaagaattcccatccctccatggtttaaataataggtaggttcttgtattataaaggaagctgtgaagaaaaggcactggcagtaacattacttgtaagtaagtttttttttttctcagtaagaatctaatattttattttgtatatggcaagcatttttttcttaaattcaattgtaactggtacacaacaaaatgtaaatatgtactatcaggtataggatgttttgggggtgtgctgttgaaaatttagtttcacgttataaagttgaccacactttcatgtctgttaatcttagtaaattatgatcatctttgtgtgaaaaatttggtctgctttcattactcatcaaacatgcagtataagtgatgatacagtgaagatcttttttcaggtttcttctacccatctcatccatgaggtttttctttcctctgagataccttaattgtactttaatatgatataagactagaattgagaggaaactttattttctcatgttttgggagaagaaaaaaatagaaatatgtcattcatgaggactgattgattcagagtttttatgcaaagtttgacctttgaactctttgttttcatgtctttatattaattcaaaccttatactcaattctcaactccttgtttttaggtggttagccagcgtttccctcagaacagcatcggtgcagtaggaagtgccatgttcctcagatttatcaatcctgccattgtctcaccgtatgaagcagggattttagataaaaagccaccacctagaatcgaaaggggcttgaagttaatgtcaaaggtgaattattttgataatctagctatcttaaattccccttccaactaaattttcagcttttcttacagtacttcctcttacatttatatttgaaataccctatggttttcagttatgtgcttttgttttatttgtttatattacaaaggaattcattagttaggtacctgatggaccttattttcatgataaaacattttattatagcagatgtcttgtgttatgaagatcattttttgcgtaatcattctagacattctgaaacagactagaatgtagactataggattttttattttaaaagtcattaaacatttttaatatgtatttttacatgtaaatataataattatatttgggaaggttagaaacactacctaaaataatttatagaatgaggaatgtttgatttttaagtactagcagaaattatatcaatgagaaaattcatgtttttaaagaatgtcttaatgtatagacttcatacaataaataatctgattatttataaccctgttttattgtgtagatacttcagagtattgccaatcatgttctcttcacaaaagaagaacatatgcggcctttcaatgattttgtgaaaagcaactttgatgcagcacgcaggtaattttcttgccacttactcagttgctctgtttgaatcaaatattttcggtttcacataaatccatgtacctgttttacatgaagttcctgtgtaagtttttttcttttcctgctctaggtcaagacatagcttgtcttattttattttactataaaagacagtcatgaaataaattaatattttttataatttggtagtgattttcatatttgaaaaccaagagggatttttgacatgtctaattaaataaaggatttgaggatggtacaatatgtggacaaggaagaagtaggattctttttatttaaaactaaaaccaaattggtatcaataatacataacaatgtttaataaggtttttttgatgttagagtatttgtgatacttaaatttggaagtgtatctaaactaaaatgttattctttaaaccaagtcaaacaaacacataagattttgtttatgaggaactgaactttatgattttagaaaacttttctgctagatttctataactagttatttcactttatttctctgagttattggtctatctgtaaagtagggataaactctttgcctgagttgtttttagagaaaaaaatgagataattcataagaaagcgctttgtaaatttatgtctggaattctgcttttcatgcagtgtgaatctaattgatcctcatcatctaagctagccttgtacaactctctcttccagtttatcatcattgtagttgttactgactttttttctgttagagaaattggagttgaaaaggtatattgctgaatgacaagccatgttggaaagagagtgaatgtcagcataggattcatattctggcactctgtgtacccatacaaagttaaaaggatcaaagttttaatcctggctctgacctagcaggctatatatctttggggaggtctttcgtctggaccttcatttccttatctgtaaaatactagcctctttccaaagtttcatccatcttaattttgttgttgtttaacttcagagcctactttgaagctgaagccgggtatcagaaatggaaagccaactttctccttgtcctttttgctttgtctaatgtcaagtcacattgtgtgaacaagccctccatatttgtaatcttagttacttcacaaagttacttcttataaatttaattcaaacataagtctgggtgtatctggtgttgaaaattctaatgactttgcatttttgaaggtttttccttgatatagcatctgattgtcctacaagtgatgcagtaaatcatagtctttccttcataagtgacggcaatgtgcttgctttacatcgtctactctggaacaatcaggagaaaattgggcagtatctttccagcaacaggtaagatttcccagtcatggggatagtgaacactctccgtttaaatttagattaatacaattattggtcatgaatagtgctttttactttgcatcttcttggactaagaattatggtttagaaagagaaagattctttttttcaaaaaaatacaaacaaaaggttaagtcatattaaataatcaacaaacctacctaggttccagtggtcattattattatttttttgtcaggttaagaaatcacagatttgctctttgggtttttatggcttgcagattgttatagatccaaagaagttcagattagcgttggcatttgactctgaagaacagccaattcgtaggaattcagtaattaaaatattgtcagtgttttaattctatgataaactcattcgtgatactcttaagtatatgcaaataaagctttatatagaaaataccggcctggcacagtggattacacctataatctcagcactttgggtggctgaggcaggcagatcacctgaggtcaggagttcgagatcaggctggccaacatggtgaaaccctgtctctacgaaaaatacaaaaattagctgggcatggtggcaggggcctgtaatcccagctactcgggaggctgagccaggaaaatcgcttgaacccaggaggcagaggttgcagtgatccaagatcgcacaattgtactccagcctgggccacaagagctaaactccatctcagaaattaaaaaaaaaaaaaaaatacttaaaaatcaaaattattaatttgggcattgtttcattagctcttattagtctcttgtgtaacataaattacttgctgtcccatctagttatataaacttgtaaagggaccaaattcctatgtatgaagagttccttacaaaggaagaatgagtccaaattatttttaaatgccaataaaaatgattagcacattcacgggaaaagtagtggactgtgaagctaagggtaagcaattgggagatgggagtttaaatgacagggcattttaatcttttatgaattattaatggattgaagtagacatggtcctgaggtctttttggtgctgtttacaaatcagctgacagtaaaaggaaaagcaaccagttacaagttaaagaaatgtgtagtgctaaatgtgaactgctaattttttttctaagtagtttgctgtatctagggatcataaagctgttggaagacgaccttttgataagatggcaacacttcttgcatacctgggtcctccagagcacaaacctgtggcagatacacactggtccagccttaaccttaccagttcaaagtttgaggaatttatgactaggtaaagtacaaccttgaaatagttgattgctttctttttggttgagaaggagagtttgccaccaggccacttgttagatatgatagaagactatgaggaaagatgtatttaataatcacattgccatgtttggggaatccaactatatattatttatatatatagggtgtgttttattttatatattgattgtcataacaatagtaacaaatcatattttatcatcttgctttcataagttttcacatttaatacttaccagggagtgaagacaacattattttcaaattatagttaaggaaaatgcaactcaatgtgaataattgacttgcctaagattccacacctgattcataggtcttttggttttaagtgcaggacttctctactacactataacatttttcagaaccctcataaaggttaatggttttaaattatttcagattaaggttcagaaaatatagtatacttcagtattgctataaaatttctgtggacatttgtttgaatcccatttagtgggatttagtttgtgaatgaaaagatcctcattgttagacacttactctgtgatgatacagtgagagtagtttgctgaatcttttaaagtacctttcacaggactttatgcttagtaagtgctccttcgtgtctgtgatttgagtgctatgttcatagtatgttccaaaacagaataaaacagaatctgatgatgagaagttaaagatttgtatataatatgccttgaattgtaagtgcctgttgttagttgtattacttacaggtcatggttttgtacatataactccaaaccattgatactgttaaaagaatatatgaatatatgaaagaatgtataaacataagaatgtatgggtatatagtgtcctttccaaattaatttttatttttagctctactagattttttttagtgtaacaaatgtttattcctatgtaattaagggcatattttccatacagactattcacattacctaattgaaaattatatactacaaaaatataatactatttttaggccagacatggtggctaatacctataaccccaacattttgagaggccaaggtgagagaattgctggaggccaggagttcaagaccagcctgggcaacatagtgagaccttgtctttattagatagatagatagataggtaggtaggtaggtaggtaggtaggtaggtagatagataggtaggtaggtaggtaggtaggtaggtaggtagatagatagatagataagataagataagataagatagataagatagatagattgggcacagtggctcatgcctgtaatcccagcattttgggaggccaaggcaggaggattgcttgagcccaggagtttgagaccaccctgggcaacatagcaggactccatctctacaaataataaaatattaaccaggtgtgatggtacgcacctgtggtcccagctacctgggaggctgaggtgggaggattgcttgaggatgcagtgaactgtgattgcaccagtgcatttccagcctaggtgacagaatgagaccttgtctataaataaagaaataagtaaaaatataaataagtaaaaagaaatataagtaaatataaatataaataaatataaatataaaaatgaatgaatcaaaacagtttttaaatttgacatcactgaggacatcctagccatttttctagaaaaatatttttattattccttttttctgagatcctaccttcccttacaaagcaatcttttgtgcttttgaagattaagtaatccaatatatataatatacttagcatagtatctggtacttgtaaagtaattaataaatgttggatcttatttttgttctaaattcccactgatgctcttggagacccattttcttttttttaaaaaaaatgaaggtagctttataatattctcagttatttaaaaaattattaaattacttgatatagaaatctaaagaaagttaaaaaaattaaaaattgtttatcctccctctcagaatacttcacttaacgtttggtgaatagtctcccagtcatttatctatgcacatgtacatttgtttctcctatcaaatgatatctaggttgtttccattaatatttttaaaattctgacctggtaccagcagcatgatgggctgagctaatgcaatctcttcccaagacataaggctcatagaaatactaggtgtaaaagaaaatatgtgtacttaaaaaaatttaggccgagtgcggtgactcacgcctgtaatcccagcattttgggaggccgaggtgggtagatcacctgaggtcaggagttcgaggcaagcctggccagcatggcgaaaccccatctctactaaataaataaatatatatatatgaattagccaggtgtggtggtgggcacttgtaatcccagctacttgggaggccaaggcaggagaatcatttgaacccgggaggcagaggttgcagtgagccgagatcgtgccactgcactccagcctggtcaacaagagcaaaactccatctcaaaaaaaaaaaaaaattaaatttatagctgaagctagtttctaagcaaattacctagcatacagtcagtatagacagataaatggaaaatatgaaagaggttaggagatgcagaagataaaatgaggaggttcaaaatatgtctagtaggtgttccctagaaactgagctcagtgagaatgggaagaagtaatatttgaaaggctaatggatgtatgttttctagagttgatgaatgacatgaatcttgaggttgaagaagcacactgagtcttgagcaaactatataaaaattaaaccaggctttaatacatatgggaacataatatatgctaaagctggtattcagaatcgagattaggatggactttcaataaatggttttgataaaactgagtaatgatttggaaaaatattttcataccatttatgataaacttccataaatcaaaaaaaatgagcaaagcaaggcctttttcatccattcaaaatccataaactagaaaagattgataaaatgaattatttaaaaaatcataaacttctgtctgggacaaaaatgtcatgagtaaaaccaatcctatggttaatattcttgcccagtagttctcttagaatagtcctaaaagtgcttttgtggttcaaagagtaataccttgaaatttttggtgcatgttgccaaattaccctttagaatgcctgttgcttttaaaatattttttcattttagtattttattgtttatccaattatagacttttttacatactcagtagacaacataaagcctcataattactctgttatttttcttttaggcatcaggtacatgaaaaagaagaattcaaggctttgaaaacgttaagtattttctaccaagctgggacttccaaagctgggaatcctattttttattatgttgcacggaggtaagaaatactatgttttgggtctcttaacagaattttttaaattatagcaaatatagagagatggcaagtttggtttttcccagttgacttaacaggaattgaagacaagtttacttgggagcatatagcagggtaaatagcctgcgtttcctaaaatgatggtcggtatctagtagctgcttttcatactacccatttcatattgcttactctgtcctacatcattttttaaaatactgcctgcaatggattaattaccaagagttaaaaacccacaaagaatcttttgttttcaagtatattctgattaaatagtactcacaacatgataactgggaactttttttaaaggaagaaataaaactataagagcctatttctgagaacttttaaaaatatgctgtgtaagacagcatcaggatgatttaaaaaataattcaaaggagtggtgaaaaatctctatgaagatggtgcaaggggtggcctggaaaacggtgcttgttcatgctgccctcagttgaggctagttcctagaaagcctttctggaaatgttgtgagctcttccttaataataggtatgatgcttgccttgctttccctaccattgtcttttcttttttgcttcattttaccttccttttgaaaactcaatctgtgacgttatttggtcagttttactttttcccatttaccatgacatacattcatggtaattgagccttagagacaacatgatacatagagaaaccactgactttggaatctcaaggaccatgtttagacctagttctgctactcattagttatagacttaatctttaccagtttcctgaatttaacagtatttaacatccatgaccattaagttagtagacttacattgttagtcagcttgctggccacaggtggcagtgtgtaggaaacaaatcaaggttgagaaatagtagagagacggtgaaggaagatcagtggaagatgggaaacttgtctaatagggtcattcagatagccttaagaccaagaagtccaaaggactggagtattagggaatcaagaaagtaagaaaattgcattgaacctcccgccacccccctgccctttaacaactctaagtaacccctgctcaccttcccatgaaaggcctctctccagctctcatctcagttgccatttctaaattgcctaagatcattttaattttcgtttgcgtttgagatgaaccatatttgtattctaaccccaacctttaatacaaccaggatatttttacttttccgttgttgtctaagtaaaaagcaaacattggtaagggaggtagaagatgtgtttccccctcttctttaaaatcttattagtttacaaatagcaaagatttctggaaaacaaagctgcgtttttttttttcggaatcagaaactgttatatttgtattccctctctgtggtgatctagaaaaagctaaaggaaagattggacctgctgcagatcccttagtgagattcaatcagtttggtttccatgaaacctattgagtcttgtggcctgagaatgctaagaattctcagctctgctgcttattagctgcataatcttttttttttttttgaaatggagtttcactcttgtcacccaggctggagtgcaatggagcgatctcggctcactgcaacctccacctcctggcttcaagtgattctcctgtcttagcctcccgagtagctgggattgcagacatgtagaaccatgcgtggctgattttgtatttttagtagagatggggtttcaccatattggccaggctggtcttgaactcctgacctcaggtgatctgcctgcctcggcctcccaaagtgctgggaattacaggtgtgagccactgcacctggccttagctgcataatcttagataagtttatttttccaaatctgttgcttcatatgttaaagctggggtatgtgcttataaaaactgtctacctctcctataaagtgttttgtgacctataaagttgtgtaaggagtaaatttgagattttctttttttctttcattctttttttgggggatatggcactgtcagtttcagattttcaatccttttagtttcttacttagacctactggagctcctcctgaccttcattttcacctggtgtgaagcctagctccaagacagatgagtacacagtatatcagagcagagcatccatttactccattatgaaggtcttgtctgtctgtatgccgtcagttttgtcaaagagcacttgggtttgacttctcttttgatattcctgtgtttctgtggcttagactactatgtattaagtaatgctttttgaattgtggattttctaatttccttatcgatggtccacagacgtttcagacttgaaatgtccaaaacttaattcagtatatcttcaaatcaacctcctcttcacaccgtatttctgtttctcagtaccatcatcatcccttctagttccccatctagagaccctaatcattttaaattctttcctcttattgtctttctcattgttagtcaccaaatcttggttttacctgtgagatcctgggcaatcagttaagttgttttagttaggcttttattgcaaagcagtcatttgtattttctcaaggatagtttttaggaaaagcatgaattagcgcagagcctacccagatatagagaactagatggctgtggtgctggaactggctatgctctttgactgtctctcggttttgtgttcaactcttcctcatgattttcatctttctgtatcctttcagcttttgccccagatagtaacccgttcattatctcagtactgcacatctgaaattccagaaagaaaatatgattcagctaaaaagcatctctgcttggcagaaactttaatgttaggttctggccagccagttgattactggctgcccctatgtccagtatgtgctcctggcccagcagtcatgtgattcaaaatgtgaccacttggctgggcgcggtggctcatgcctgtaatcccagcactttgggaggctgaggcgggcagatcatgaggtcaggagatcaagaccgtcctggccaacatgatgaaaccccatctctactaaaacacaaaaaattaggcaggcgtggtggcacgtggctgtagtcccagctactcgggaggctgaggcaggggaattgcttgaacccgggaggtggaggttgcagtgaaccaagattgcaccactgcactccagcctggtgacagagcaagactctgtctaaaaaaaaaaaaaaaaaagtgaccacttggtgctgtttcttcatcaggggctgttcttaggtatgtgttttaattttttttgttttgtttttgagacagggtctcactctgttgtctaggctggagtgcagtggcactaccatggctcactgcagcctctagctcccaggctcaaacaatcttcctgcctcatactcccaagtagctgggacaacaggtgtgtgccaccacagctggctaatttattattattattttttttgtagagatgaggttttgctatgttgcgcaggctgggcttgaactcctgggctcaagcaatcctcctgccttggcctcctaaagtgctggaattacagatgtgagccaccacacctggcctaatttttttttttagttggaccttaatggtctaatattactattacgtaccttggcaatgtctttcgaaaccattttcccccactgctttgctggaactctgtgtcttacctatactaatgtagcattattctcctcctccttcatcaccagttgactacttctaggtaatcttaacatttcttctggagccagtttccagtagaaagcttgtctgtcccattgactccctgtataaagtccaagttctgtagtcaaacatgcaaggtaattttggcctaatgtacttttctaatcttttccttctattccatccaatatacttatgctcttgccctgtggtaaggtagcataatacaaggacattgttgcaacattgtttatatagtggcaacaaaaaggaaaacaatagagttgtgtttcaaaaggggaattgttgaataaatgatgatacatttacattagggaataaggcaatgtgttaattttgcttgttacaagtgacagaaatgcaattcaaatttatgtgtgccaaaaaggaatttattgactcatgtacctaagaaaatcaagagatgtattagtttcttgcatgactagctgcagagctttaaacagtatcatctgcagaacatctgtcttctctggctcttaactctactttctttgtgtcggttttattcccaagcagctgctccctagctgtggctggtaatggtttgtgttctcccagcttaacaatcccagaggaaaaacacctctttcccagttttgtggtttcagcaaaagtggttggtcttactggcctggtgtgagtcacatgccattcctaaggcagtcactatggcaagggggatggaatttcttggttatctaggcctggatcatgtgccccttcctggaatgcagtggtaaagccagccctatccaaattgcatgaactaaaaggagggcatgggggcagggttttcacaaaggaaaattgaattgctgttactagaatgaggcaaaatggatactgggcaggcagaagtagcagaagtcctctacatccagctttaaaaaggcccagaaagatgactctgacacttaccttacaaggtacacgacagtgtgtgtgtgcacctgcacatgtgtatgtgtagactgagaaatgtatgaaagtatacatattaactgttcacattgcttatctcagaagtgtgattggaggagatagaggaccaatttaatatttctgttatctatctctatgttgtttggcttgccaggagcatatattgtttttgtaagaataattaaaaatataaaaccccaaagtggccgggcaaggtggctcacacctgtaatcccagcactttgggaggccaaggcggggaaatcacttgggctcaggagtttgagatcagcttgggcagcatggtgaaaccctgtcaccacggaagaatacaaaaatcagccgtacattgtggcatacacctgtagccccagctactcaggaggctgaggtgggaggatcacttgatcctgggaggtcaagactgcattgagccgagatcacaccactgtactccagcctgggcaacagagtgaggccttctctgaaagaatacattaaaacaaaacaaaacaaaaaccccaagttacaaagaagagttttcctcttaggaatattgtgatacctggcaattgctttttgggtggtagtagtaaataatgataatagctaacatttcctaagtgctttctctgcatcaggaaactgtgcatattacataatttctcatttaatctacataataaccttctgagatattattaacaattaattgacgtacgtataaactgaaacccaaacatggctatcagaatgatctggaacattaaaacaaacatatccccagcccccatttccaaaccaaaatctcaggggcagggccttatttatatatttaacaggcactccaagtgtttcatttattactaaagtttgggaatctcactgggtcatgtacttaattcatggtagcacaactagtaagaatcagaattcggtttcaaacctaagccaaagctcttaacaaatgcactattaattacatgcttattactattataattgtatgcttgggtaaatctttgtagatgagcatgaaaacctaaccaacagttatgagatatattactctggggaaaataagttctcgattccaggcatctgatttacaaatggttttttgaaacataagacaagagtgtactcaatataagataatcttgtcattggcgcaatatcattatacattacaaaggttagcagaattggcaccttttcttagcgaaatgacatattactattaacacattcatgaaatatgttaatacagatgaatgtgttattttgtagagcgctttagtttatcagattagcattttttgtctgtttaataaaaaataaaatatagaccgggcatggtggctcacacctgtaatctcagcactttgggaagccaaggcgggtagatcccctgaagtcaggagtttgagaccagcgtggccaacatggtgaaacccctctactaaaaatacaaaaaattaatcgagcgtggtggtgggcatctgtaatcccagctactctgggggctgaggcaggagaattgcttgaacccaggaggtggaggttgcagtgagctgaggtcatgccattgcactccagcctgggcaacaggagtgaaactctgtctcaaaaaaataaaaataaaatacaaaaacaacttcccccataccactccttatcccacacccccatcctctatcccctatcccctatccttcatctctctgtcactgttgctcactcgctctctcactctcatgtgtgtgctctctctcacatacaccacacacacacacacaccccacctacataatttcttctcttacacctttaatataaatatctgagttttggttcagttttgcaaacatttaaaaggcaaacatggtattttgcttgtttcagcatttaataaggtagtgcatacttctttcatatggaaggaaaacatcatattaagttaatatttaaacgtacacaattataatttgcaaaaaaaaatcaagatgataatttcttaaatagtaaattgaaataaatgatattttcctagcatgcttgtcattcagcaataataagaaactgagataagaatgcaggcagttgaagttcacttcagcctgagtgcaagtatacacaaaacagcaaaaatattacatagaaaataaatgttgtccattggattgagtatggtgctaccatttgtcacagtgttcatattcatagttgtggctatctttggggtcactgctgtattcagacttgtcttggaatttggagtcatctagggatttgaggtcattttgagatttgggcttgtcccaggattggtgctaccatttgtcacagtattcatattcatagttgtggctctttggggtcactgctctattcagacttgtcttggaatttggagtcatcttgggactcgaggtcattttgagatctgggcttatcccaggattggggttcattctgggattggtgctcttcctgggattaggtctggtcccgggattcaggcttgacgcaggattggatactgccatagaatttgaggttgttgatgttgaagtttgtccccggaatgttaacaaacatgaagagcaggccaatcggtgatagcttgaacatcatcctcctctgtttcacaataattatataattttaattgaacacttggatcacaaataggcaagcatatatccttaattgtgtttatcagtacatttgtgttatgtaaatgtttgctttttcactattagtgaacaaattaaaagcttccctttctttgttgtcaacatctgctgacacaagacctattttctattgagggctaccaactgaaggcaaaaacaatcccaagactgaaaaagagcttaattggcatttttctatttaaaaaaggaaaaaaataaaactctagacattcaatgcaataaatatgggggcttgagatcagtatagagtagggtaggggcaaagactgagaggcaatttgggacagtagagcaacaaaagaaataatgaaataaatattggtattttcttgatttctcatgacctttattccaacaatttaaggttttagtttaggtcacaaattaggatattacttctaaatatttacccaaagactaaagaggttaaaccaaagcatttccccagtgctgggatgaggttttcttcattaacaacaacaacaacaacaataacaaactagagaagttcatagttttaagatttagaaatgaacaaaaccaactccttcattttgcaaatgggctcagacaaggggcataacttacctgagggtgcatatctaaaaatgacccaagctagaacttaagtctgtgacttaaagcccaaattttaactgtagaactctaacatatatattaaaagttacatttggctctaatatgtaattgagaacatttcaaattaatgttaccttttgatatttttctttgaagagtaagaattcagtctttctccagcgtctatggggaatctgatttctcactcactgcatgctatttaaatataattagtgaggaagtcatgtgttctaaacttgacctgccatttgctctttggaagtatccaactgagtgtttccagacaactacatataaacagatagactttggcagagattaaagaattcaaataaagttctaaaatctgcttgctaatttaaagaatccagtgaatagcatttgttattcctcttaccatgtatacattaatgaattgcttcactggattgactctaactagatgaatttactattttgcctgctgtgattattatgattttaaaccaagtaagtgtattaaaggtgtctgcgttttccttagaacatctgtacatatgtttatagggcagtttctacccatggttattttgaagtttaaaaaataattcagtaatacaacatttcaggtatttaatttttggtaaataaagtaaccttagaaaagaagttaaacttcattaatatgaaacttaagaaaaggattacatatgaaagtgatactttttcatactgagtttacaaacttttgtgtgtttgtgtatggttttttaatgtattaaaccagtcaccttgaagtgcataaagtaaattttttgaaggaattttgtcttttggtcagccgttttccatgataactagcatatagggaaattgggttgtattctgctaatgttttcatcatattggccagcacactttaaaaattgcaggactgtgaacaatggtgttgacatacaaggaaattgcaacataaatggcagaagtacaagccagtacatgttcctcacttgttttactgtgctgtgaagatcatttttcccctgaatgaataaaccatgaatagaaccatgcttggtaaatcttatttatatggtacatataataacttcacttaactggaggttaatgtggtcagatctaagaagtaaacaaacaaaaaaaaactacttggcaaccagagtagatattatgaatcggagtactgcagtaatttacaggagtttgtcattgtcctctctctgctcacttgctcattctgtggatttctttggggggtatatagttggtaatagtaatagtaatagtaatagtaatagtaatgtttcgaacttgagcaaactgtgacttattctatttttctaatcttgaccttttgagtactacacttacacaactctttattgatgcttcaaacacctcagtctcaacttgtttaaaattcagaagttagtgttttctccttcctatttttgtatctagatatattcttctcataatctcttggttaattgtatcatcacctagccaaatgtttctccaacactggatttctcattatcttctctttcttatttatcttaagctctccaggcctcttcatgatgattaagtaaaatttaaattctatttagtactcaaatgttcccaaacaaacaatagtcaatttgccattattcaggtcttcaaatacccaccaactttgtatctttgtgcagcctccccaacttgcccaaagtgtaataatagccccctcttatcctaagtttcactttccatagtttcagttacccatggtccaccatggtctgaaaatactcaatggaaaattccagaaataaacataagttggatgtatcatgaggttaatagtagcctagcactgtgtcacagtgctgcattagtcaacccacttcatcttatcacataggcattgtgtcatatcacatcatcacaagaagggcgagtatagtacaataagatattttgagagagatgccatgtgcatgtgcttttattgtagtatattgctataacttctattttattattgtttttaatctcttactgtgcctaatttataattaaactttatcacaggtatttctgtataggagaaaaacacagcatatattgggttcaatactgtaattctgtggtttcaggtatccctgaggggtcttggaacatatcccccacagttaagggggtactactgtactttcctcattcaaaattgtgttgtttcttcaagctccactcatgtcagcaccttttatacgatccttccctaattcttcacgtcagaatcagtcattttagtactttatactttgatcagagtctcattttcactaaagaaactaaatcttccaccatattctggctttttttgtggtaagataccacctcttattccttctattccctctagcttctaatatagtgagtgtttataaagaataggacacagggccagttataaagaataggacacaggctcatgcctgtaatcccagcactttgggaggccgaggtgggcagatcacgaggtcaggagatggagaccatcctggctaacacggtgaaaccccatctctactaaaaatacaaaaaattagccaggcttggtggtatgcgcctgtagtcccagctacttgggaggctgaggcaggagcatcgcttgaatccaggaggtggaggttgcagtgagctgagatcgcaccactgcactccagcctgggggacagagcaagactccatctcaaaaaaaaaaaaaaaaaaaaaaaaggggcacaataagtattggaattcattgaaatacctcctgtttctccatgtcggagggctggtatcattaatgatgtctaaagtaagagttatttggttatttgcagttttcccttcacattagcataaatttggaaggcacaggcttgagtttaactttcatctctactttcctggctgctgttttgagaagatttcttcatttgtacaatgtggatcataatgcacattcataatcccttgtctgtaatctgaaaccccaaatcctccaaaaaccttaagttttatcaaaaaataaaaaagtttgacaccaaaatttatttggtgcaaatgccttatctgcatagatgggaggtttttagctatctttgtttcacttagtgtggatattaatgttgcgctgcagaaatattgatgagattgattttggggtgctgttccattttctactggagtgttacataatacatgataagaatagtacttagcatattcatgtttctcttcttccttctgggcacagcaccataccactcttagcattctgatagttaggtggtaccatctgactgagttctggccagtaaaatgtcagttccaatgatgtacaatcgacccttgaacaacactggggttaggggcactgaatctccacgcaatggaaaatctacgtataacttttgcctccccaaaaactaaactactaataagactgttgatcggaagccttttgataacataaacagattaacatgttttgtaagttaaatgttgtatatgctatattcttagagtgaaataagctccagaaaagaaattgttacccagaaaatcatgaggaagagaaaatatatttactgttctctgagtggaagtggattatcacgaaggtcttcatcctctttatcttcatgttgagtaggtggaggagaaagaagagggattggtcttactgtccccgggctggcagaggtggaagtaaacctctgtataagtggatcagcatggttcaaagccatgttgtttaagggtcaactgtatatgatttttaagcctgatgtctaacttctcaccaatcttccattcttgctttcttctatcaacgcctactagaaacagacggttcagtggagggggtctccaagacgccagaagatggtaaaaccattagaaagcatgatttaagagaaattaacttttgttgtcttagccagtgatattttgggattatttgtgacagaaattagttcgtgctgactaacataactacatgctggacatcttgcctttgcctcttcaaatccactctgttctttaccctgctgtgtaccctaagaggctgacctgtgtagagggtatcattgggctcccctcctttctggctttcagctggcccatagggaatacaagcggaagattagggagaagaaagagagtaaggttaggaggtatatatttttggctccgtttctgcagggtcccagtgggctggctacatccatccatgcagtatggtttttgttgggtgaccctctccacacaacctactctgtgtctgctttctgctaactgcttcctgcactcactacttcaggtgtagtatcacactgtctcttaagagtttccttaaaacctgccttctcctttatacataatctctaatatctcagtttgaatttgccacctgtttcctgctagaaccttaattgctacaagctgtatgtacactgtatcatcttcctaaaatcaccaggcatggtgggatgtgagctatagtcccagcaactcaggaggctgatgtaggaggattgcttgagcccagaaattcaaggctacagtgagctatggataccctaacctgagcaacagagcaagaccttgtctctaaaaaacaaaaattaagttaaaaaattgtgtctttctttatatacttacattactttccgttgatctgtttttgaaatgtttccagaactgtcttccctcacgtattgattcttccaaaattcttaagaaaatggaaaaaagtaatttctgaaaatgatgagaatgatcataaatttcatatagcactttcttgagaatttcaaattgcagttttaatattttactttagaaacaggtccagttttcccttctgtaatttttttctttggtctttttggattttttgggttttttttttttttttttttttgaaaagaacacagagatcttttcttgagtgatatttgcacagacattgccttggtaattgaagcttttttttttttttttttttttttttttttttttttttagaaaatcctattaagttttatgccatgtctatgctcattgcacctgtgcctcatgtctcattcattcattcgtttatttttttattattttttttttttgagacagagtttcgctcttgttgcctaggctggagtgcagtggcacgatctcagctcactgcaacctacacctcccagattcaagtgattctcctgcctcagcctcctgagtagctgggattacaggtgcctgccaccacgcctggctaattttcgtatttttagtagagatggggtttcaccacattggccaggctggtctggaactcctgacctcaggtgatctgcccacctcagcctcccaaagtgctggaattacaggcgtgagccgccgcgcctggccttcatgtctcttttaaataggacttctaaaattttgaaatgaggtcagcttcagtggctcatgcctataatcccagtgctttggaaggccaaggcaagaggatcacttgaagccaggggtttgagaccagcctgggcaacatcatgagaccctgtctctacaaagtacatttaaaaaaaaattagccaggtgtggtggcacacacctgtatagtcttagccacttgggaagctgaggcaagtagatcgcctgaccccaggagttcaaggttgcagtgagctatgttcccaccaccgcacttcagccagttaaggggacagagcgagaccctgtctcaaaaaaattttgttttgaaatgaatttatgtatgtttggttatttctgaaagcagttcaggcctacagccataccaccctgaatgcacctgatgttgtctgaaagcaattcaggttttcaggattaaaatttttatgctactaggtttgtaacctatatttaaaagtagaacatttaaaacattttagtagtatatagcactgaaaagtggctttttagcgtagacagttgtttttcaagaaactattttgtaatcctagctacttgggagcctgaggtgggaggatcgcttgagctcagaatccagtctgggcaacaaaggagaattccagcctctttaaaaaaaaaaaaaaaaggaagaaactatttgggagttttgtgaacaatggatatgcaaaaagacaggccattgttatgagaggcctaattgtgagtaccttctagaattgtatataagcatgattctcttcaatagtaaaatctcagcctcttcattttagaaatctaatataggaaaaagaacacatttctccatagttgtaaaacataggttctcagggtgaatgcccatctttgagcaagtttgtcttcctaatggtataatactgtaagtctgttatctaattttggcttgttgtcacttatttttcataatcaaagaaaaatgatttaattttaaaaagatgctctcctttctgttttcttctcttggatgatagtatccctatctgtctgagtttatagaatcttaatttttacctgctcttaccacatacatctgattagtcattaagtcttactgattctgcttcagaaattttgttttatgcttcactctcatgctaccaacttatttggtagcttcagcagttgtctaagctggggttggcaaattttttctgtaaaggaccaaatagtaaacattttaggctttatagcccatataaagtttttttttaattttttttttttttaaaaaagaaagaaatgtaagaacccacacctgtaattgcagcactttgggaagccgaggcagggtggatcacgaggtcaggagttcaagatcagcctggccaacatggtgaaaacccgtctctactaaagataaattagctgggcgtggtggtgtgtgggtatgtgcctgtaatcccagctactcaggaggctggggcaggagaatcgcttgaacccgggaggcagaggttgcagtgaaccgggatcgcgccactgcactccagcctgagcgacagagtgagactctgtctcaaaaaaaaaaaaaaaaaaaaaaaagtaagaatcatacttagcctggaggccatacaaaaataggtcacaagcaggctgtgggaaggatattgtaagtgggccatactttgctgacctctggtctaggctattacaacaatttcctaattggagtatttgtcaccggtattttaccccggtgtaagattgcctccatcttacacattactgccagaatcatctctctgaaatgtgaccatttcacttccaggtaaaatctttatgtgctccttttagctaagttttcttgcttaaggtattcatgtattacttcggggattttttttttttttgccatttcttcataaccatctatattatttattcagtatttttatagacttttttttcttaaaggaaagtttatactgtgaatggaaaatcaatattgattgccataactagaaaaccaacaaaaggcaacagtaaaaggaaatatagaactatgaaatgcctgtttcatgtagcacccaatcatatatgtactacatttcaaaaagtcactggcttataaaaatattttttagcatctcatacaagtctcttcataatctgttatacagctcaccttacttgcacgattgctgagccaaagcagatcgaaagtcattttggtaagaggctagatgctgaccttgtattctgaaaatctgatgattctactgttgttgatgtgattccaagtaagcctgtgtgaacttctgggctattctcagggaagtgtttatgacacattgttgaaggtatcatcagggcagttgatccaagaagactctaggagctggctaagccacaaagtctgcccaaaaagctcagaatgacaaatgaatgttttgtacattatctccactataatgctagaaaaaagtcttaaaagcatttgtctcaattgatcatttatatggaataatactggttaatcatcttaaatcatcatagtgttgggtaatgtctgtagaaggatgctttaaactctacttggtgcttcagctatgctgaccatctcaccattgccccctttgccatgccctgacatcctcacatgtctctctgcttttgcatactcttttccacctggtttgaatgcccttcctttatcatgggacattatcctttccatttaatacccatcttgataacctgactctgaccccctaggcaagtttaaaaaaaaaaaattcattgaaatgaaattcaccctttttgaagtgtacaattgcctgggcacagtggctcacacctataatccctgcactttgggagactgaggttgggagagtcacttgagtccaggagttcgagaccagcctgggcaacatagtgataccctgcctctacaaaaaaaattgcaaaaattagctggatgtggtggttgatgcctgtagtcccaactactcaggaggctgaggtgggagaatcacttgagcccgggaggttgatgctgcagcaagctgagatcaagccactgcactccagcctggacaatggagagagaccctgtctggaaaaaaaaaaaaaaatcttttttttaagtatacaattttgggccgggcgtggtggttcacgcctgtaatcccagcactttgggaggccgaggcaggtgaatcccgaggtcaggagatcaagaccatcctggctaacacggtgaaaccccgtctctactaaaaatacaaaaaatcagctgggcgcggtggcaggcacctgtagtcccagctacttgggaggctgaggcaggagaatggcttgaacctgggaggcggagcttgcagtgagctgagatagcgccacagcactcaagcccgggtgacagagcgagattccatctcaaaaaaaaaaaaaaaaaagtatacaattttgcatattcagagttgtgtactcattaccactgtctaattttaaacattttcatcactccaaaaagaaacctcatagccatcaacagtcactctcccctttcctcctgccccccctcagcccctggcaaccactgatctactttctgtctctatggatttgcacagtttagatgtttcatataagtggaatcatacaatatgtgctcttttgtgactgccttcttttactttaatattttcaagattcatccatgttgtagcatgtatcagaactttatccctttttatagctgaataatattctattgtattcatacaatatataagcgtttgtgtggacgtatgcattcagtttttttagatacatatctaggagtggaattgagtcatatggtacctcagtgtttaactttagaggaactgccaaatgattttccaaagtagctgcattattttacattgctaccagcagtgaatgagagtttgaatttctgtacatcttcacccaacacttgatattgtctgtctttctagacaaattttgataaatccctccttttctaaaccatagccaagtctattactgtttaacaatgaccatcttggagtataaattttctgttcacactttgaactttaacttccgggtcttagatgtctttatctggatatacagagaatctaggttttgtatgtaattattcaatgatagtattaaaactaagtccggacgcagtggatcacgcctgtaatcccagcactttgggaggccgaggcgggcggatcacgaggtcaggagatcgagaccatcctggctaacacagtgaaatcccgtctctactaaaaatacaaaaacttagctggtcgtggtggcgggcacctgtagtcccagctactcgggaggctgaggcaggagaatggcgtgaacctgggaggcggagcttgcagtgagctgagatggcgccactgcactccagcctgggcgacagagtgagactccatctcaaaaaaacaaacaaaaaaaaacactaattaccagtttttttgtttttgtttttttgggacagggtctcactctgtcgcccaggctgaagtgcagtgacgcagtcacagctcactacagcctcagcctccctgggctcaagtgatccttccagctcagcctcctgagtagctggaactacaggtgtgcaccaccatgccagactaatttttgtatttttttgtagaaacaccatgtctagctgatttttgtattttttgtagagacagggtttgtcatgttgcccaggctgatctcaagctcctggactcaaatgatccaccttggcgtcccaaagtgttaggattacaggcatgagccaccttattaggcctaattaccagttttaattatagacctacatgactacggtttgaaggaaaaagactttatttaatcctagtgattggaattggaattctcatttgagccagaagatttcttgagtggttttgttttctgtgataacttggtttatataagtaatccacattacttgggtgttagtggtaaagcaagtctttgccttgtacaacaaagataatttagtgattgatacattctgaataatctggtggttatgacttgacacatacaaaaaatgttagtggttgcagtccatctgttgctctgtaaaaagatttttgttattgtttgtttgttttgagaccaagtctcactcttattgcctaggctggaatgcagtggcatgatctctgctcactgcaaactctgcctcctggattcaagcaattctcctgcctcagcctcctgagtagctgggattacaggcatgcaccatcatacctggctaatttttgttttgttttgttttttctttttttttgagataaagtctcactatgtcacccagcctggagtgcaatggtgagatctcagctcactgcaacctccgccccccaggttcaagagcttctcttgcctcagtctcccgagtagctgagattaaacagtcatgtgctaccatgcccagctaagttttgtatttttagtagagatggggtttcaccattttggccaggctggtcttgagctcctgacctgaagtgatccgcctgcctcggcctcccaaaatgctgggattacaggcatgagccaccgtgcctggcctaatttttgtatattttatagagacggggtttcgctatgttggccaggctggtctcatagaactcctgacctcaggtgatccacccacctcggcatcccaaagtgctaggattacgggcataagccactgtgcccggccaaaagtttttttgaatcacctatggttcatttatttcagtttaagtgtataatcctcaaaggaaataatccattgggatgtatttatgaagtttaagtctgtaaaacaatgtggaggccgggcgtggtggctcacgcctgtaatcccatcacattaggaggccgaggtgggcagatcacttgaggtcaggagttcgtgaccagcctgccaacatggcaaaaccccatctcttctaaaaatacaaaaattagccgggcatgctttgcgcgcctgtaattccagctactcaggaggctgaggcaggagaatcgcttgagcccgggaggcagaggttgcagtgagccaagataatgccactgcactccagcctgggtgacagcatgagactccatcttaataaataaatagccaagtgtggtggcacatggctatagtcccagctacttgggagggtgagacaggagaattgcttgaacccggcaggcagaggttgcagtaaaccgaaatcgcaccactgcactccaacctgggcaagacagagtgagattctgtttaaaaaaaaaaaaaaaaaaaggaaaaattctgaaacaaccatgtaagaataaatgcatccaaatgaacgttgttcatctcagaagagtcacctttggaggtgatgcacttagttccaactttgctgcctttgagcacaacattttagggaaataattttttggaagtgttgtcaaagtctgaaatacattcttgtagaatgtggaaaatctcatacttgaaattttttgataagcaagacaaaatgtcacgtttagtaatactgttttttgtttaagatgaggtttttctgctggacatgggggctcacacttgtagtcccagcactttgggaggccaaggcaggtagattgcttgagcccaggagctcgagacaaacctaggcaacatgatgaaaccccatcacctgtacaaaaaattagtagagtgtggtgatgagagcctgtagtttcagctgcttgtgaggctgagatcggagaatcactttagcctaggaggtcaaggctgcactccagcctgggtgacagtgagaccctgtcttaaaaaaagttttcttatgtaacttacaaactagctcttagtggtatttgaaaggaacagccccagagttgttttcagtaacgatggtatcattggagtaaaagtatagcgatccaacctgactactttgaagaaataatacagaaaatgaggtgtatcatgtgtgacatttatgtttaaatttaaaatcagtttatagtcaactcatagttaatatacgaatattttttactaacttcaagtgattccttgatcctttaaataattttaatatgcttttttgttgttttttgttttgagatggagtcttgctctgttgcccaggctggagtgcattggggcaatcttggctccctgcaacctccacctactgggttcaagtgattctcctgcctcagcctcccgagtagctgggattacaggtgtgcaccaacacacccggctaatttttgtatttttagtagagacagggttttgctctgttggccaggctggtctccaagtcctgacctcaggtaatctgcctgtcttggctcccaaagtgcttacaggcgtgagccaccacacccagcctattttaatatgttttaaagagactttagcttttacaaggtgtctctaagctcatacttaatgacctgcagctttttttgtagaatttaaagtcaaggcaagagactcataatactttatccaagtatattttgttaaagcaaaaaaaatgtcatgtgatcttgtggaaaagccataccatgaggaaattttagctcctataaataggtgaaactatttttaaacaattgtttgctttcttagattatttgtcattggtataaggaatacagatgagtatttaatgtctaaataatataactcataaatggatgtggttgtatgccagttactcttacactacataatatctcaaatgtgataatggttgctgaggctttggatggcaaattagggctttcccagtggttattgtggtgtatggcatccttgtcttcccttacttatgttttgtttttcttctttctcaatggaaagccattaagtcttagttaattttctgttgaggcaagcatttgacattcattcgaattccctcagccttccagaagcattcagtatgtttcaactgtgactatgagcaacaaaataatacaaagtgaaaaactgcgtttcctggtgtgagtatttcattagatttattgatccttggccttatggtatccatgtgaaatgttcagacatctaattttttactgctaaataatttttttaggggataaataacaaaccttgtaaattatttgaagcataactgaagatgtcagatatatgagaaattatttactattactgtttcagtcattttcacttctaatcttgttaactacccaagaatctcttgtacaaaggatagtaatcattaaaatggttatatagcacccacaaagtgctttaatatacatgttttaatctattccttaaaacaccttctggagtatatgttcttaaccatattttttatcagaggacacatttaatcacttgcccaaggtaaaaacacacaccgtaggtgataaactttatgtcatgctctgctgttaaaccaccaatatagttagaattattttgatcagacaagagcgaagcagttttcctgtttttagtgagtgcgtatgtatgtttaatttctgtgctttgatctcattcataactgtgtgtgtgtgtgtgtgtgtgtgtgtgtgtgtgtgacacagggtgtggctttgtcacccaggctagagtgcagtggcatgatctcagctcactgcaacatccgcctcctgggctcaagccatcctcccacctcagcctcccaagtagctgggactacaggcacacgccaccacacttggctaatttttgtatttttttgtagagacagggtttgccgggctcagagctcaagcagtctgcccacctcggcttcccagtgtgctgggattacaggcatgagccactgctcctgggctcattaataacatattctcactcataggtgggaattgaacaatgagaacacatggacacaggaaggggaacatcacactctggggactgttgtggggtggggggaggggggagggatagcattgggagatatacctaatgctagatgacgagttagtgggtgcagcacaccagcatggcacatgtatacatatgtaactaacctacacattgtgcacatgtaccctaaaacttaaagtataataataataattaaaaaataataaaaataaaacatagttttaaaaatacaaaaaaaataaaaaataaaataactttccagaaatttagattcagaatctcaggtcaggctttctagataaggataagtgggtatgttgagcatgtgtctcacctggctcttaaatatgtttaacaaagttggggctgttgaaccaaactgacatttcttaacagttgatcttcttaaagacctcactttgcaccacagttttctaaatgtgaaacatactaatctgcttaacacattattaacaccttaacatgacatttgtttctacttctcttctaacttcccttgagcaattttctatattgaattgttcatgggtatcagaattaacctttctctagaattgttccaaaggtaactccacattgcccagaactagttttttttgctttgttttttttttttttttttttttttggagtgggagacagagtcttgctcttgtcacccaggctggagtgcagtggcatgatctcggcttactgcaacctccgcctcccgggttcaagcgatcctcctgcctcagtctcctgagtagctaggataataggtgcctgcccagctaatttttatatttttagtagcgatagggtttcaccattttggccaggctggtcttgaactcctgacctcaagtgatccacccaccttggcctcccaaattattgaggttacaggtgtgagccatggtgcctggcccagaactagtttcttatatgactagtagtagcctagccaaatcctccctcattcttaacttttctttgatctttcttttctcaggactttgaagctgtaactttgaaataaatgaaagaaacttagactctagaataagactcgcaggtttgacttggtctgtcctaagtaggtcattgttagccaactagtcacatctttgatctatgttaattcattcttttatttataaattcagataaaggtggtcaaaaaaacaaacttctaggggcaagtgaatgtctcagctgaaatcaaaaggatgagtagggtttgagagggcaagaagagggagagaggacatgcagcatctctgaaagcctggtggcacgaagcatggtgactaagggacagaggatattttgtttgtttgaactataaaatgttagagagctggaaaattttaagatgatactctaaagggaagcaaggccctgatcatgcagtaaaccatattaagagtttagattttattatgagatatgagaaattattgaaagggaagggttggtacacagttcatcttgtgtcttcttatttctcttgttttcttactcagtctagatgccctagacaaacatttcagtagttcttttcttagatctcttggctatttcaaggacaaggcaggtaataaaatatgcttggtctacagtgttagttagcattttggcatttttctttttgttactttttaatacatggttctatgtcctataattttttcttatttttctaatatttgcgttttccacatttcacactttaaaaaactcttcataaatatttttattggccagatattctggtcagtgggtcattgtttacttaatttcctaatggtggatatttattgttgtttcagtttttcttgttagaaagaatgctgtgatttacctataggcaaaagtttaaatgccttaactgtagacaaaagttaaaatatcttacttttttaaaaatttcattgccaaattgctttcccaaagaattgtgccaatatgtgaacatggccatttcattctaccttccccatcgttggttttttttttaattgcttgctattttaatagtgaaaaatgatgtcacatttttattgcatttctcaattacgtggttggccatattcccatatattaatcatagtattttgtatcttgtaaacattctttttatgtcctttgcccatttattcattgagaattttaagatttttttctcatccgttttatgagctcctgattaacaacctcctttatagcatcttatttgaatatttttatcaggctggttgtttcagcataatggggattttgtatagaccaatctattgataatttctttgtgattgtttttttttctaattaaatagccttccacctgaagacttacaaatatttttaaattcttctgctggttttatgacttccttgttcatgttttctttcactttgtcagtgtatcacatgaagtgagtgttaaactgaacttttttccaatttcctcatctcatttattgagtcttttcctttcccctttggtttctgatttttctttccacagctaacaatgtttgagaatttactgtgtgctaggcactgttctaaacactttatctgtattatctcattttcttctcacaacaaccctgtaaggaaatagaggcacagaaacctaatttgctgaagtgacacagctagtaagtaaagctttgtcacatattcagttcttctgtgtacctgtgctctcattgtgctgttgtttctatattgtggttatctttctgtttttatgccactatcattctgtaattattatggctgatacatgtttctctctcaagaaaagctaatatcggccgggcacggtggctcacgcctgtaatcccagcactttgggaggccgaggcaagcagatcacctgaggtcaggagttcaagaccagcctggccaacatggtgaaacctgatctctactaaaaatacaaaaattagctgggcatggtggcacatacctgtagtcttaactactcaggaggctgaagcagaagaatcgcttgaacccaggaggtggaggatgcagtgagccaagatcgcaccactgcattctagcctgagtgacagagcaagactctgtatgaaataaataaataaataaataaataaataaataaataagttaatgtaactgtagtatttacttctttttctattcttgcttgtttctaagtgaacttaaggttccaaaacatttctcattggaatatttttcagaattgccttaatctgtaaactatactggaaataattgcaacgtaatagtatcccaccaaagtcctctgtaccttagtgtttgatatgttccaggtgctgactaaatatttgttgagtgaaagaatgaatgaatgaatggagagaccttagtttgtcatctgcatcaagtcttaatttatacttctcattaatatttttcagattttccccatttgatgctgcatatttcatgttaatgttacttcttgacattgtatatttttcccataattttctaattatttgttgccaatatctgttatttctgtttttttgttttggaatttcccaaatattgttaaaaaagattggcaatagtgggcatccttgtttcgattgtgattttaatagaaatatgttattcttcaccagcaagatgttgggtggtagtgtgtaatacattcttttatctagttcttaaaatatattttataaggaaaaattttatgaaagattttaggttaactcttgactgacatttttggtattaaaggaatttgctgttgtttgatagcatcattatggaagatattgaatagcacatatttgtgatcttttaagttagctatagaagccatcttctcattctgctgtggtaagtgaatgtctttctgactttcttctgggtccctatttcactgatatctaaacctgatttctagcagggaagagactaaagcaagcacatcctttcattcccttgctctcagtgtgtagagctgaaatgtttccatatatgggaatttctcatagcattgggtttggacatacagatgtgataataatcctcacaacaacaacattactgcatctaggaatgtgggtgggccaagacactgtgaagggtttatgtgaattatgtcatttaatcttcagaaaaaaaccactgtaagttctgccagcccattttatagatgaggaaactgtgacttagagcagtgaaataacttgtctatggtcatacagctgagaagtggcagaggcaagttgcttgtaaagtagagccaagccttagagatggatgggtgaagatagatatagatgtatgtgtatataggtatgtgtatatctgtacacatatgcatacatatttgatgtgcttgagagatagatgctaaggactaatgcattttgaaatttttctggagccaggaatatagtaatacttagtggcaaataatgagcctttttccattaataataagaatataatttctttggaaggaaatactatctaattatagtttccctcagtatatctgggggattggttagcagacccctgtgtataccaaaatttgcgcatattcaaatcccaaaatcggccctgtggaacgtgcttccttgtggaacctatttatacagtatgtgggtttcacatcccacaaatactgtgctttcaatctatgtataagtgtgcccatgccattcaaacccatgttgttcaagggtcaactttactttaaggctagataattcttctgtctaagaacttagagtctgagtagttgacgtatattgtacttgtaagtttaccaagtttgactctgcattttgcagacatgtctgtaggattgacataatccataggtgctcctaatgcagtagtctataatttgactttcttattacttttccccttaaaaattctaagacagcattgagtttttggtatcctcagaggaaaagacagttacctctaagatacctactttcagggcaggcgtggtggctcatgcctgtaatcctagcactttgggaggccaaagcaggcgaatcacctgaggtcaggagtttgagaccagcctggccaacatgatgaagccccgtctctactgaaaatacaaaaattagtcgagcgtggtggcaggcgcctgtaatcccagctacttgggaggctgaggtgagagaattgcttgaacctgggagggggagattgcagtcagccgagatcacgccattgcactccagcctgggggataagagcgagacttcgtctcaaaaaaaaaaaaaaaaaaaaaaaaaaaaaaaaagaaacctactttctgtgaaagtcggtgtatatgtttttttaaataagacacaagtatgtggtagagtagggattatctaagcaattagtccctatcatggatggtgaaggtactaatcagtgtttgggagggagtggagatagcttccgtatatagagaggtaatgcattttaaaatcatttaggggactttttcaaataatcctgtttcttcatggtgagattccctgacacagtgagccaatcaggtttgctaaggcagaaaatgttcgagagccactgtactagacagcatgaaagatgactgttttgttgaagcttaatggtaatttttccataatcctggtccttaaaaagcaaaaaaaagaacacattagagtgttgttacttttctctctctcaatagaaatgttcctaaaccagcaaaggaggctatctgaatttttaaaagtttttacgaaggaacataaaaattcctttctctatcttttcccacctctagaaatgcttgaaatgagattctgccttacgtctcacaaattaaataccacatttgtgtctcacccatctcagttatgctgtcttgcattttaatcaatcctgtttcaggacttcttttgctgccttgtggctgtttcttatgtttgtcactaattcataagttggctaacttttatatttgtagagaatttctcagtgattttcttctagttggagttccagtgtggtttgatttggagtgtcaagatctctgtcccatgcctagccttagtcctcagtctgttttactgggttcaccacctggttgtagtaccaaatgcccttttccctttccctctctccttcctcacttcctcagtactgcccaagttcgtcagacccaatgattttattcttaagctaatcttatttttaatttaggtaattctgatttctgatttgtaaaagataaattttcttctccttcatgtagtaggattttaattttgtaaatatttaaattctccattaatggtgtgttaaatctgcactaaaactgcttctttacatgtttttaaattttttcattatgtttttaacacttttcttacatgcaaaaaacacaaccgttaaacttttcttattaaaatgcaaagcctagtgtcttctagctttttgaagagcttttgtccattatataatctgtcaagtagccaagagttcctcagaagcaggacatcatttagatttaaaacaattatggcttgtctgtaaaataatgttgtagcataaccattcatgggatggcagctacgattttacttcagtaaaatatccttggatactaccgccattttatttaccttaaagattttaccaaggtaccctagaacaaaaatggtgaggtcattttgattctgctaaagttggtatgactggaaagccaaatgacacagttatgagcatagaccttttattttccagatgtttgacagtgtaaacatacataaaatacatattaaagtttagatgctttatattttgtgcaataaattgaagccttaaaacatttcattttttttataaaagaaactcattagtttacttaattaagacagtaaaatagcagcaagtaccaagacattgtgcatttcttttatttaagacaagttacttcatttacatcagagttagaaatgttaagactggctttcttgaatacttaaatatagctcgaatcactggttagatatggacatattttcccaactgtacatcagggaggagtgctttcattagtttcagaaaatgcagaccctcagacagccagcatgaccacaacattgagcaataagagaaatgaagcatttactttccaagcatttgccacagaaggtaatggagtctttacatttgtggttgtctcttccctccataagttaagggttgtgctttgttgaggcatttcagagaaattatttggcatgccactagtgatacttagggtcatgggtgttggggatgattttgttgagctagtgaggcttgtgtttgtgaccattccatcttggagatgaatagttagagttgcagctgctgcttcatgtgaattgatagtctctgtggatgtatcttctggatagggcacaaaagccttatcagtgctagtaaaggtggtgtctttgcttagagtggcaccaaacgttgtttcctttgttcgatattgtttgggtattttggtcactttgggttgagttaccacactcagagagttaatggtgtccactgtctgcatcccacttacagtgaataagcttgaggtaaatccagaaggtgtgggatacatgttatgttcctttaaagatgatatttgggtagaacatggagtccctatcacatgggcttttgtttccatcatccacttcagtaagtaagtaatgttttgtttgtggtcacatgaccacctgttattgtaaagggttatctcttgcaactgaaagagttggtcaaaagattggtctggaatgaatgtgaacttattgttgtgcaggtaaagatgtgtgagatttgtcaggtttattaatgtacctggaagaatttgtgtcaaagaattattagacaggtccacgatatgtagtttggagggcatgttggttggaactgtccaaagtttgttactactgaggttgagaacctcgagacttcttagtgtatttttaatgaggacaaccttttccagcatgttcttagaaacatccagatatttaagattccactgataagcagtatcagatttgtcaagaagtttaatgttgttgttagcagcagacatgttccacagagaccgaggtaagtgagcaggcaggctttcaagcctgttgtttgaaatgtccagggtcctcagattggtatattgggttaactggttatgcagatcagtaaagtggttataagacaggtttaaatgtataatattctcttgcagtccagatggtaatgtagacaagtttctgcctgaacagtccacatgcctgtgcctctctgtgcatatacattggagaggacaaatgcataaaataccaggtgtgagaaacagaaggatgaacaggcagagagacattttcaatatctgatattccatcaaagcctagaaacaaacagatacacccttcttttaatatgcaaatacagtttaggcatctgcatgggtcagttagcattaggcaaaattttcaataaacctcgttgttgtcgagtccttttataattgttccagtgattaaactaacaaagctccccttcatttatagtccaaatgcttaatccttcaattgggctatgtggtagagagagactctctccctactctctcctgcattttctcctttattttctctctccctccccccttttctaaccatattctttcttatttatctttctagagccttaatatgataaaatagcattctttgcaaataaatagttgcagttgtaggctattactatttttgatgatatgctttcttactcagatgagaaaaaatggctgtcgtgtcttttttttttaatctctgcagtaatgtaattcaatgtgtgtatatagggtagattttatttagatattaaagcagttcttcgaaattttatctgtatgtttttaggataaatatatctttgtaaaaagcacttgaaaaatccagaccaacacagtacctataaacctcacattttataaagtgatttttttctgtatatttcagtgcccattttaaaggaaaacaatatgtatatttacagagtgactgaatgtataaaaaatatccctcaactgacactgcagcaaatttctggtgcatgcacttgctattgaatatatatttaatcctaacgttgactttttcttaaaagaaaaaggaaaaagattccaaagtcagccttttactgatttaaataacatcttaccgtggtgtcgtcttcaacatcagcatctcattttctctgggaaacttaaaggtcgtcttgttctgtagagtcggaactgtttctggctgtgggctgtgcttgcctgctcagctgcattgtgttgctgtgagctgaagctctgcaaccacctgatcagtaccacataggaggactgcagagctgtcgctggtgctgactcaaatttatggcaagaggtgcacacgcaacaaaatggacaattttttaaaaaatttgtggcatcaagcgtacctatatatctgatttgctataggatgggataccttatgcatgagagttggcccttactcctttctatgtatttgtctgagattgggttccatattttaacatttgcctcattaagaatctgtgaatttttaaaatacctctactctttatcctttttacatgttgaaaataaatttgaccttcctcatggatagttttctatgatattagtcccactattttttaactcctgcctttttatattcctttctaaaattgtataattttcatgtcacttttttaatattataaaaaatctgttttatgacttttatgtcttcccccaacatggtgattattatgtttaatcagcttttcaaatttatcaaccacttaagtgttccgtcttcccttttaggatgtatagaagtactgaaatacgattattttttctttatctttctgatacaatgatcatttgaccaaggctacacacaagccaggatacatttggaaattagcatcttatacttcagattatcagttcctatgtaaaataaacatgttttattttatatatttggagttaaagttttttttctttatgcaaccttgggtggtaagtggatatgagtattgttttttccaaagacatttttggtgctgtatgaatgaccatttatttgattttatgttttaagaatagcagtatcaatttaggtgatttcagagtgttgcacatttcatctttctgggaaagtagtttatagttttaaaattacatgaaatgatataaaaggaaaatttttcatcatgagttttataaagtgagatcagatttatgataaattttgctccactcttcagtggactgcttgtgtaaatctgttaaaacacaaatctgatttccagaatggcaagtttaaagaaagcaaataaagttacggtattttcgttaccaagtggcaccatttaaaaacgagtaatatttagcatgttatgtgtaaggaaagtctctttatgccttgttactaaatcgtttgtttttctctaaattatattagcattatttagattataccacaaatagaatttgttgtattaaaatttgaagtttattttcttacaagagaaactatactctaggagccaccttttgtataaaactaatgttcctcgaaaagtatctgcattttaagagtccgcaacatagaagtttattgttgattgggtgctttattgccactttactttgagggttcagttgaactctcaattggattcttactgtggatttaggaaaccagccatcaatcatagtgcttaaaataatgtgttaaaaatactacattcagcaatattgtggaaatagggaatgcattgacatttagagttctatttaagctcatatatacactgctgcacttctaaagatgtgactgagggtcaatttaccgaccacttaaatctcttaattttaggaaacctcattaagtcagtgtagaagtagagttatgcattttcattacacttaacagtacttttgtttgaaagaaaagacatgttacttcattaatggattcaaatgaatttgggtttaggctgtatcaagtttagtttctgttgtatataatagaaaattccagtgcaatagtagtggcaatgtttctcatttcaagtttgggacataccaaattgcttcatattattcaaagattattgtaaaattctcaaaaagaaaaagggagatcatttcaatatatttgaattctaacaatctcttacactgggtgcagcacaccagcatggcacatgtatacatatgtaactaacctgcacgttgtgcacatgtaccctaaaacttaaagtataataaaaataaataaataaataaaagaaattctcatgaaataaaataatactgtattactgttactcaaaaaaaatattttttagaggcataagtatgtgttacaacttattttaaatattattcagactcattacattttctattaggctgtctaggtcagtaatgatagttaggcaacttttacattctagattaagcagtaaattaatttacgtattcttttgtgtcctaggatatattaccccaacattgtgaaaggtatcacaaagcatctgccaaggaatagctatcccacgctaatcagtggtttcagttttccattattataggtaacatttgctatgcttgagagtcagatattgtttatttttggtaatatggttggctatttagactgattttcctgctgaatacaactgagagtactcaataaagtactttaaaagcatgaaagaaataacaacatagaaattaccaagtcaaaatccaaatgaatcagtttctttgcccacctccctactcctttttttctttatgccactggcttgttgccaaaactcagtcaattatttcctaaaatgtctctcatcttggagttttctctttgactctttgggaagatttaatttgttcttctgtcccccatattttctataagtgattcctcatatcattgacataattgctcatttgcatcatctcacaataatttcaaaataataccagtattgattgctacaattagattatagactaccgaataaagtttaaaatttgtttgtagctctgcttgctttattttactaaaagtgtatagtaaattctgtgttctaatgcaatgtgaaataattcttttctgtgtatttttatatcaccaacttgatataaactttgtttcagttttcagcttttcaggatcacaagtcaaaattatatatataacaatgtatattcagataaatcttgcttctctgtcttttccatcctatttccttccttctgctattagtaactgtttttattagtttttcgttgtatcattaacatttctttttgaaaacctaaaaaaaatgtaagcatatgtatggtatgttcttatccccccttctaatataaaaggtgacatatatacatactgttagataacttgttcttcttttcttactgtatcttgagtatcactccatatcagtatataggtatctgtatgattcactgtttgatccatagtactccatttgggaatgtaccatggcttattcaaccagtcccctattggtggacatctgggtttttcagacttttgctgttacgaataatgccacagtgaatacccttgtacctaaataattttatatgtttgccagtaaatctttgaaaaagattcctagaagtaggattgctgggtaaaagggtaaatgcatttggaatttttccagacattactaaattcctctccattgattataccattttgcagtcccaccaacagtgtatcatggtgtcgagttctatacagcctcactgtatactttgttgttgaactttgggatttattgtccatctgataggcaagtatctccatctaattttaaatgcatctctgtaattatgagggggagtatatgtctttacatatgtttaaagaccatttaaatgttttctcctgtaactgtctttttaatgttttgcactattaaaagttgtgttttgggtcttccccttcctgccccatattaggagcattttaaattttagaggtattagcactttgtcttgatttaagttttaatttttttttccagtttgccatttgtcttttggctttattatggtgaggtgtgtgtgtctgtgtgtaatgcgcacttgcatgtgtgtgatatttaaaagtttcatataatttgatttccctttttattgcctctggattttgagtctcagctaggaaggttttttcccgcttccagattataaaggaatttactcatattttcttctattacttgtataatttcatggtttatatttagaactctggtccttggtgttccaatatagtgtgaagtatggatcaaattttttcttttttccagatgtctatccaattgttccaatgcttgtttccactgatttgatatttatttctggactttttcttctgttccattgatctgtttgtttagtcatataccggtaccacagtgttttagttataggttcccaaaggtgctactttactttttgatcagaattcagtaagaacaacagttaaagatcaccctcatctaattcatttgtgtccctcaccactgacaccaaatagaagacttatgtgatatatgtatgtttcagtgcatgatgtaggtgctctttggtcctatattagtgaaaagagtgttgaaccaatagtcagggagcaaactcagcttttaataccacttctaagcacatcacttactttctctggtcctgttttctcagtagttaacaaacaaaaggagttgaaccaaatggtcttcagggttgtgtctgactctggttaatgctattttggttaagagcaccactagtatgtggtgtgaactttaatctaccttttattcccctgtgccttattcttttgcagtattcatgaaataaactttctcttctggatcttagttctttaatcttttctctaaaagatttttctttgttccagcattttcttctgtcctgcatttattagtttgtatctcttcctgctgattaagcaaggattgccactgtttggctgctcagcttccactgacctcactggggaaaattacatgcagttaaatgtgaattattcttcccccagcaaagaatttctttaaaaaaaataaaaggaaaaaagacaacataaaaacccggctgctgccagtagtctgtcctgttatacaaagaacagaaagagaaaacctccctttaaaagtacttaaagatatcagacaacactgtggtcagctaatcagctcccgtttaatctaagaaaattggtatttccctatttttccctgtatttctttcaggaaagaaggtggtaaaaaggggcaaaaatgtggaacgagcccattaagtaactgtcacaaatgtaaaatgagaacagttatgatgatttaaggcatgtcaaagacttggccaagtataaaaacatatcttatttaccataacaaaaattcgtaaaattaaaaagaataataggaaattctcaactccagattgctgctggggaaattagctttaaaagtactaagtttgggccgggcacggtggctcacggctgtaatcccagcactttgagaggccgaggcaggtggatcatgaggtcaggagttcaagaccagcctggccaatatggtgaaaccccatctctactaaaaaaaaaataccaaaattagccaggcgtggtggtgcacgcctgtagtcccagctactcagtaggctgaggcaggagaacccctttaacgtgggaggcggaggttgcagtgagccaagatcatgccactgcactccagcgtgggcgacagagtgagactctgtctcgaacaaaagtactaactttgaagaatacatgaaagaaaatttttaatgaggaagacaaaagatgtaatatgacaataagtatcatgcttattcaggaaaagtaagaagctcaaggaagtgtttctatagattaaaaaattaatggtcagtaaagatggcttgaaagattttaggaaaaacattgtatgtaaaattcctgtgtccaaaaccctactggttcttattaaatatggagctttgttaatgtcatgaatgccagtgctatgaataaatgctatgttctactctgaaaatcccagaactatgagtggttctccaagactgggctaccattttattctaagtgcttgtttccccctggagttagatgggactaatgaggaagaatatgtgcttgttgggcaaaggagcacttctgcagacaaaggctggcatccccaaaagtataggctgatgaccactcttgactttgacaaagattgggcccattcctactctaataactcagacttaccaattgtcagataatggataaagatgaaattctgtgtaagaaaggtgacttaagagtggatagcatcagaaagtataagtttagtaaaaagttgagaatcatctgtgttttgatagtctcttttcctgaaaaaaaaatcacccaaagtcacccgtatttagaatgaagccatagtcttcttttccttttttttgctttataaaacttgattttgtttgggtgtttataaagaagaaacttgtaaagatgccagttttaaaatttgtgcccccccaacatggtaggaaaatatttacattttatgatgcatcctcatatttttttcagggtaaatgttcctaacccaacccttcagttgatgttttaacatgtttgttttactctttgcaatgaaaccaagaagaaaatttctctattctcaaacatgcattttaatctcccattcccacaaacttggaatatttatttaatacttgaggtattaatttaaaacttgaagcatatacttagtctcttattcctctccaccctggtctttgaaatggaaacataaaagtttattcaccataattttatacacagcttttcaggggaaaaaaaactgtactgggtaataagtatatgtagattgtttcagagttcttaaattattgaaacataccatttacatatgtaaaatgtactatactttaaagataggtactataattagtaaatagattactgttaaataactttttttaaaaaaaagtttcatctatgcacataggctctgagcagatttcagatagttcctgaataaaaatcaaaattgactatcagttgccattttatatatgttaacatataaagaaaaaagagtcatttgaggatggaagatcagctaaaaagcaagttgtaatatttataacagttctgcaggtggaggtggcagggattcattaagatcttgatcagagttgggaggaatagagaactcctgacactggatctcaaggttggaatcttcttggtttttcataaaatctactggtggcaggggcaagttaagtgagtcaagcggtggaaatgattgtattatctcagatttatgatctccacagtcttgattgagacagtccagagatggagggagactagtagaatcatttggaagaggagatacaattgtcattgtgggtttgtcagattggttactttcctgtccttccaaatccagaaggggaggtggtggaggcagatctgcatcatctgaagaagaaacagcagttccaactgttgaaccatcagcactatcttctgatgtaccatttacttgatcttttattttctctgttttggggttgttggagtcttcaatgttttcacttgattcaaacaacttaatttctaagtcatctgctaaaagtgtgcttttgcttggtttccagggtgtaagtgaaatgattgatgtacgttttgtggatatttcattttctctgatgttatccatacaaatgtcaggggtttctccatcagcaaatggagatctacctgcccaattttgatcatttaaaactggtttccttaagcatttccaaagtacaatgatgattatagctaccaacatagaagtcagaagtacaccaattagtatggcagctattgaattataattgtttttttgtggggtttgtttgttactggtagtatctaagataaatcctggtgtactcctaggtgaatttttgacagttgatgttggttgtgtggatggattatgaacagttatttgttttctagaagggatctggacagatgatgattgttgagtaaaagtatagacaaatgactttggtggttgtgtggtagaagtacgggcagatggtagttgtctggcagaggtgaacacggcttgctgggaggaggtgttggctattggtgttggttgtttggtgttgtaggcaagtggttgtccagcagaagtatgtgcttctggtttttcagaagaggtatagacagctggtgttggttgtccagcagtgactttggcaggtgatattgattgtccagaaaaagtgtcgctgaattgtgttggttgacccaaaggattccctgttgtgttttgagaattagccaatacctgtgacattgatgatgtgaataaggtaggctgtgactgcttctctgttgtaattgtctctgtctttgaaaaaaatgtattgttcaggtgtccacaaaacaaaattaagatgaaatatttgggatccatttcagaatatttcctcgttatctatagcgggtttataatgaaagagaaagacagttaggcgtcattggtgtctagttaaaaatttgacttttcattatgattcctggcataaagtaggtagacattattcctaattagtagtagttgattagtagttattattcctaatttagacttgatacactgtaggtttggtgtaacaactcttggatatactctaacccatcatacagcatttggacctcataagcagtgatctctcttcttttattaatacaagttctgtacttggctctgctgcccctctagcttcattatatttcagtacttcacttagtcatacttctcaaaacgcataggctctatatgctggatccatgtgttctctaccttttttcaccattttctactagaaatatattgattctcctgccttgaagaacaccagtgatcatctgttacctaatctaattgttctttatttcttctctcccctcccctccttgaccacattagacactactgttccttcactaatattcaagtagctttttgtaatcagtcttcctttcatgttactctcactagctctttttcttctgcctcctaaatatggttaattgatattctgtcctcacccttacctacttttctttgttcctgattctgtaagattttagttctcagctttatgccacaattcctaaacctgtacctccagcctacatcttctttgtcctaattctatttgtgtgacttcttggtggatttttccatattttatatatatagatagatagacatagatatagatataaatatctcccactatcagcaaattcaacatatttaaaatggagttcatctttaccctcacaactgacaactgactcttctcccaacttctctgtatctgttaatggtaccactaagtttcttaggcacagagtctattagtaatctttgaagcatccttagtgtctctgtagcgtggtagccttatgttaatattgcatatttttaaagaatttcattcaactcagagtcttaggcttaaaatcctagagtgatctctgaatctggtggagtaaattcaatccagttggtcaagtagtcctgctgctgctttcattcatctattggtaaatgccacatttgtgtggagctctgttctaggtttaggagattaaaaaaaaaaaaaaaagatagtcactgcctttaagtgtttcagattctagtgatagaagcaaacagtaaaggccaggcgtagtggctcattcctgtaatcccagcactttgggaagccaagatgggaggatcgtttgaggccaggagttcaagaacagcatggaccacatagtaagatcccatctctaaataaaaagaagaaagaaaaaaagctaaaaaataattacaataattttttttttttcaagacagtcttactctgtcacccaggctggagtgtagtggcacaatctgggctcactgcaaattccgcttcccaggttcaactgattctcctctctcagcctccaagtagctgggattacaggtacacatcaccacgcctggcctatttttgtatttttagcacagacggggtttcaccgtgttggccaggctgctcgagaactgacctcaggtgatctgcctgccttggcctcccaaagtgctgggattacaggtgtgagccaccacgcctggcccaattacaataatttgataagctttctcataaaagtatgcaggagatgtacagagaagttaacctagcctggaaaggcttcagtgaagtaaagcttgaactgaattttaaaagtctataaaaactaattaagtttccagccagggagagcaacaatgtgggcacaggaaaataaggcacatatgaaagtttggcagatagggctttttctgggatgtggtagatgctaaaacttggagagttaagtttcagttctacttctcccatctaactacctgtctaaccatgagaactagttgcttaacctttcctgttctcaattgcctttcctctaaagtgaagagttctactgagacaatttgcaacttttggtataatatacttgttttgcacatcatcaaacacaatggcaactatttggttatctcttaacattagggaatagaaaatcttagggtgttagatattggtatacatgattagaaactatagttcttctgactcataagcctatatttagagagatttgatgttctgttggaaggtgcaataaaggttttacaaattaccttttcagcatatctaaacagcatatcattgcttactcctctaccacttggtacacagtgatgataaatggccctgttttagtagaagaaaagatatgtgatttttttccctatacgaataattcaagcctgaattttaaaacagttctcctttgaactctcctgcacactgctgaattaatcttaaaagtgtgcatgatcaggttactactgccttgcttgagggtttaatttctgttaagataaaacttcctttttctttttttttttggagacagagtcgttctgtcacccaggctggagtgcagtggcatgatcttgtctcgctgcaacctctacatcctgggttcaagcgattcttgtgcctcatcctcccgagtagctgggactacagtaggcatacactaccacacctggctaatttttgtatttttagtagagacagggtttcaccatgttgtccagaccggtctcgaactcctgacctcaagtgatctgtccgcctcagcctcccaaaatgctgggattacaggcatgagccaccacgcctggcctgttaagataaaacttctaaattgagttttcttccttctggcttgagttaaccagtccagattcacgtatcatgactgaaacttcttatccagccaaatgcatccctttcccaccttgcatactttctaaacacacgatttttccctgctaaacagacacttctatgctgttttttacccttctcaagggtgttcttttttttttatttttcttccagacctagcctcttcccctttctggctgcatatctgaatctgtcctcatctttcagacctcagtttaaattccccttcttaacccaagttctctgtgactgactacagcccaaacagatcagtcatttactgaattccccctagctctcatttattgtttttatggttccttacataattcatgtatgtatctcactcacacttctattctcttaagtaattgtgtttacttttcacattttcctatacctacttccttgaacaagattataaagaaccttgaagaaggcagaaaggagaaagaaaaatacttatctagagcatattatgtgttgtactatcccagttttgcatactttatttcacagaaccttcaaatgactttataaggaaggtaaagggatcccttatttacagataaagagacagtgtcaaatgagttaagcagtttgcctgatgttataccactcgaagtgacagattgggagtttgtacccagggccacctgattccaaagcatacattctttctgctaccctttattgcctcatgtttttatattttgatttctttgtagttaatgccttatatattaggagcacagtaaacatttaacctgtattgggcttcttgattcctttccattttagtttttgctttttactagtacttctaccagaaaataagcagaggcagtgaaatctgagttaataaattctgctttttatccattttgcaaaagatttaaaagggaaaatttgaacacttttggcatagatatagggatttgaataatctctggatggtcatcatccatgcagttcctacccattattcttatagattacaaaaaaaggcggggggacttctttagaaaatgttattctcttcagaacttcattttaaaaatctgttttaatgctatgcaaagcatcagaaaatataagccatgaattgtctttagccaaaaatgtttcctcttttgtgactttgcttaaaataaggaaaccatacggttcctcttttcagttagctgaaaaaggcattagagaaggacagggcccaaacaggaacataattttaaacccaggttagtttgtaagatcaattttgataggctcctatcctctactgtcagtagtaagctggtggaaccctccatgtatgagattttcacttgtcagttaacggttatggcaatattaaaaccaaattccattttttgcctatcctaacactttctaccactcttcagttagctttttatcctcctaggatctgccacatcagagtactagaaactgtattagaattctatgatggcaattcagtgtagtccagagaaggagaagaaagatttaaaagaggaataaatagggaatatggtagtggaaaaaactgacttttttcccagcggtaatgaggccagcgttactaccagtgtggaaggttatttagcatacacattttaaaatatgtaagtggtgtgtacctgaagtaccaacattgtttctgtaggtaaagaacaatattgggcaggggaataaaaaggagatttagaataatataaaaggcaatgcaaagaaatacaaaataacacaaaagagaaaaaacaaaaactctaggaagcagcgaacagaaaagaggaaggtcaattgactagagaagatacagaaaagaagaaaagttaataaacaggtgaaaaaaaaagcagtggttatataattagcaagaaggcagtgtagatgattgaagtaggcaaaatgaagttgggggtggggggagatgattgaagtagatgaaagaagcaacggcaaaatgctgctctgttgtggctggcctgtgtttgtgagtgcagggagacagtaaagaggagcttgctttctaaaatggaggaccagaaggaaccatcctttcaaattcatttacctttcatttcaggctctcctgtctgctgtgagtatccttaccatcctctccctttttttttccctgacactatccagaagcatacctagcaattattccaaagaacccatgtacccgtgtacgttttatatagagttttccagaaatcccttagtctgctgctcaagcaaatttgtcagccctcatatgccggtttttactcattattataggctggcactttgaggtttaaatctgtgattttggttctttttctttgctgaatatttagaatattttaaaaagaaaaacataaatttaaacattttaaagacagttacagtgaagcaggagtccccgtgtataagacatgttctttttttttttttttttccgtttggagacagggtctcactctgtcacccgggttgcagtgcagtggtgcaatctcagctcactgcagcctctgcctcctgggctcaagcgatcctcctcacacctcagcttccctaaagaagttagaaactgcaggtgcactacaccacgcccaactaatttttgtattttttgtagacatggggtttcaccatgtcacccagacttgccttgaactcctggactcaagtgacccacccaccttggcctcccaaagtgctggaattataggcatgagccaccgagcccggccatagacatgttcttataaatataatgcataagtacttaaagggtccagcatttaaaattgatgctgttaagttggatatgttaggaagtatgccattatcttttaaagagaatcaagatttggagagcatatcctagacaaaagacaagtatagatagctgtatcaattactttgatataataaaagttgtgatgcaaatataatagattaaaatttagcagtagtattatctctaactagtgaagttttgaaaccgtaaaagaaaaaaccagccattctgcatcttgaggaaaagtggaaagagaaattgaccttcaactacaataggaagtatttgatgaccatcttgtatcatgatagtgaccatttactgagcacccaccaaaggctaagcagtatcctattttaattagctaggtggtggttttttcatcctacagataaggaaactgagacaccacgatgttgggtaacttggcagtatcacagctctaagtagtggcactaatacaaaaatcatgctaatcttgtgccagaaccgtttctttctatcacatttcactgtatgtgctatactgcctttcatagaaaagttatgaaatagaaatgctttatgaaggaaggagatgtgagttggtgggaattacacgtaaataacacttgtaggtagtcttagataaagggtaggaaagaaatacctgaaaacccattttagtcctgattctacgaaaactattataagaatttggaatggtttctataaagtgtcatatttagtaagtttactgaaaattttgtggtgattttttttttaaagcttggacattgaaaggcatcagatttatgtttctcaattcaaacttaatcagaattaaagtttccttctaagtagaattatgtgggaattagctggaaaacacaggcactactagtaaactttagatttgggactaaccctttaaaaacatgtatgggaccaggcgcagtggttcctgcctgtaatcccagcactttgggaggccgaggtgggccaatcacttgaggtcaggagttgaagaccagcctgaccaacatggtgaaaccccgtttctactaaaaatacaaaaaattagccaggcgtggtggtgggtgcctgtaatcccagctactcaggaggctgaggcagaagaatctcttgaccctgggaggcggaggttgcagtgagcctgtgagccaagatggtgccgctgcacaccagcctgggtgacagagggagactccatctcaaaaaaaaaaaaaaaaagtatgggattctatgacaaaaacacaccataaggatcgatgggaaattttttaattttatgaaatatgacagtgaaaaaaatttaatataattttatgactttatgcataatgaaataaactaaatattagaagtagaaaaatatatagacaagcctaatctgaaaaagagataaatatctttattttctgacttccacagtaattacttagaagaaatccttctaagagaaagtcatgaatatttattaagtgttgaaatgggatatcacccactatgaacatattattccctgaaattacaagtctatgtaaaatactctttgcagtttttatttgcccattttacccacagcaagcatcttttatgcatattaacaattttctattgtttattctataggtttcttctatcttatactatgttctaaagtctcagataatgtgacataaacacgtagatgatattaatatacgcatgcatgtttgattattgactaacatttttggcttagtaagcttttaaaatgagccataatgttttcatgtcatcattattaaatataaaatctatatgtaaaaaataaagcatgtataataataatagtcaaataccacatctgatttctttttctttctaaattaagtgaaagtgaccattcttactatgcaaactaaaggggatacaaaaattttaatttatgcattatattatgtacaggaaaattctataaaaagtacattagaacttttaacaattaatattttggaggttataaattcagtcatagcctgtggaatctagttctatttctaacccttagctttatctgccatggctatagtttctttttaattctaaaactaaggttaacaaatatgattgtggctgggagcggtggctcactcctgtaatcccagcactttgggaggcggaggtaagcggatcacccaaggtcaggagtaggagaccagcctgggcaacatagtgaaaccccatctctactaaaaatacaaaaaaattagccaggcgtggtggtgggcgcctgtaatccgagctacttgagaggctgaagcaggagaattgcttgaacccaggaggtggaggttgcagtgagctgagatcgtgccactgcactccagcctgggagacagagcaagactctatctcaaaaaaaaaaaaaaatatgtgtgtgtgtgtgtgtgtgtgtgtgtgtgtgtgtgagattaaataaacttaaaaggtcttatacaaacctaggtgaaaatatttttctaaggcaagctgaactgagtattttttaattctatgcaacaaaaccacaaaaacctgttatagacatctttagactatcagagtttaagtttaaaacactaatgacagtttttaaaataaattttatataaagcaagatcaaaccaaattgtgtgaaaattttcttacctcagctgttaacttcttttgcagaatgctaaattcttgttctaactggacattttggtgatttggctaagaaaggaaaatgggtggttcaattcagatttaaaatgttcctctagcaaactgaaatagtttctgtagaaaaagaggaagtttatcaatagctggttccggaagtgcaataaaccacaaagtgactaagaaatatattactttaacagaacttattttgaaatacattttggagccctatgatttgagtgcttttaattatgtaaataaatatttgagatactctagtaatatgattatgtaaattaaatatttaggatggagtcccgaagagaaaattacatgttctaagaagaaaagctgccagttgggttatcacttacagtgagatttcttctcataagaagtgagtgatgtgttctgtttacttgtatgaccttaggcaagactctgcacttctgagtcaccgtttcctcctctaaaggaatattttattgggttattgtgaggattaaataagatagcataatataacatgtataaatgcctcaccaactgcaggtaaccaataaatgtaatgttatttcctcataatataaaaagtccagggtaaaagtataattacattattttgcaaatgacaggatctcattcttttttatggctgaataatactccattgtgtatatgtaccatattttctttatccattcatctgtttatagacacttaggttgcttccaaatcttggctgttgtgaatagtgttacaacaaaagtgggagtgcagatgtctctttgtacagttttcctttctgttgggtatatacctagcagtgggattgctggatcatatgatagctctatttttagttttttgaggaaccaccaaactgttctccatagtggttttactgatttacattcccactaacagcgtacgagagttccattttctccacacccttcccagcacttgttattgcctgtcttttgagtataagccattttaactggggtgagatgaggtatcattgtagttttgatttgcatttctctcatcagtggtgctgagtaccctttcgtatgcctgtttgccatttgtatatttgtaattaaattattttgaccaaatattttactagtgacttttgagttcaagttctcaactatttatttgattacccacaaagtagttacttctcagtggaaaataaaataaattggggatcattttttaaataagaagttaactaaagttaacttgttactaaagggtaatgaggggttggggagatggtgttaccagttaataggtacaaaaaacaatagaaagaatgaataagacctatttgatagcacaacagagtgactgtcattaataccataattatacattttaaaataactaaaagtgtaattggatcctttgtaacacaaaggataagtgcttgaagggatggataccccattctccatgatgtgattatttcacgttgcgtgactgtatcaaaacatctcattaccctttaaatatatacacctactatgtacccacaaaaatttaaaatacaaaaaatttttaagttaactaaacaaagtgtattgaaaggagtgagtccatctgaataaaaatttctttgagtaagtcacctttcctctcttgaaaaatggagatcataattcctaatttataagcttattgtggaattaaataaatgtaaagtgccttggatgatgcatattatagtaggtacggaatgtgttaacccatgcactgctttttcctggtcactgcgggaaacacaggttattatgaccttgttcttaacttcagggtacttatagcttggtgcaaaaagaatagtttttttttatgggctcctactataaagcataatataatcaaatgctataaagcttttgattcactggtttttggaagtattgttgtttttacggacagggtattgctgtgttgcgcaggctggtcttgaactcctgacctcaagcaatcctcctgcctcagcctctcgagtagctaggactacaggcacatgctactatgctcgctggctggcttatttatttattgtaaagatgaggctcttactttgttgtgcaggctggcctcaaactcctggcctcaggtgatcctcccaggattataggtgtaagccactgtgcctaacctgattcactatttttaaatccctgaattaagctggtgaactgtaatacccaggggtagggaatgtgtttttgttcaaaactaaatgacttttaaattttgaactcaaagatatcttacctaccattttaaaatacctgtcatttggaaaggaaacacttctgtttgttcagtaactatcattggatagtaccattctgagagtatatgtttaatagccaagatagtgagtggtgaattttaaatattcttttaaatatccttgtggtagaagctctctggtgagaaaatgtttgaccagtatgttgaatatgaaagtaatttcctatttttatgatgatattaatttcttttaattttctctgacacgtgtttatttatgacccttgattcaaggagtgctttgtgttactcctggatgtactggtgcacaatctcaaattttcaatttttgcacagaatgggaagtctgcccagtttcatttctaatctgggttatttttcccctcaaaagataacctgatttcagtcaccatgactggcatgaatattctcatgctttcctttttactttgttaacacttaactttatctggaataatattgttatgatttctcgtttagagaatagatttgttttttacaaattgctaataaattgataataaaaatgatgctttatttttttcctctcattttaataatagctagacgtttgaatttgatgaccaagagcagttatcaccttgagagttacgtaaaaattaccaatgcttagagttcaccccattccagttgcatcagaaggaagacatgggaattaggcattggtgttttttaaaaactcttcaggtgattctgacatgcagccagggtaagaatcactagcttagaagggagagtaagattgtagtcatacttgggaaaaaacatataaaaaatatttttaaaatggttactatattgcccgaaataaatgcccagtaagggatgagatttttgaaatgtggcctgatcttagccctgtgttaatttcagtagatatttggaaagtctctcaaaccaatttttgtaatatatttaattgaagatgggggggttctcaacttaaatgtaagtcattattttacttgaagccagtttctttaaaggttaaattataacctgaagtatgcagttttccagatttgaacacacacacacacacacacacacacacacacacacccctaataaatcattaggctacttggcatccttgaagtccaaaaattaatcaacctttggtacttgttgttaatgttccagtaagtagtatttatagaaaagatgaatattattaatcataaacagtgaaacatactttgcgtttacacttagcctattggtgtggctataaatcttatttattttagttgtgctctatttcttattgatctttacaatgtgttctctaaagtaataaagtgaatgcaaatatacgtggtcacaggtttattctgagttttaatttattatacaaaagtaaaggttttaatttaatattaatagtagaaaaacactttcttacgtgtgccatatggaaagataaaggatctattctaaaattagctgtgttggttgataagctggtgtggattctgccacatccagcaaggaagataccattaaattacacagtttagctctctctatctatgcattaggaatttgacttccatttgatgttaaagcatatacttggctttaaggacacactaaaactattcaaagtttaattacattcagacaaagatcatctaaccactgttgctacatagggaatatttatttaattatcccttgctatctctattaatcagtttcctcaatttatccttaaaattttcctcaaatgcttagttattttattatttgctttttaaaatattcagtgtcaaaacaaaagtacacagtttaaataattaagcaggcatacttctccctgtctcacctgcttgattctaaattgcaaggtctaccatgtcaaattttagataatcagaacaacactttgggattaaataccaactgacttcatttttactccataagccttctcattgctactttgcatttttcttcactaacctatctgtttgttagtaagtttttcagttccttcttcatcttttctttcccttgtagctgtgagcactccagtagattgcatcactaggttgggtcctgtgagctgttttgttcttttccaagtgtctgattcagcgggccatagaccgcttgccagaaaatcgccattgcttctaggctgacgcttgcctacttgttttgatcgtctgagagaagagactttgtttgccaaaaccacagttgatagaaatagaaaggtacagataagaaaaagcactgcaattataattaagcaaattagcatagccatgttgttgttgttttccgcacagacatcctttttgaaaatttcaccatgacttttgcttgtgttttcaatgctctgtactgttgaaggactgttgctgacgacagaaggtatataaagctcctgttcagatttagaagttaaagctacgatgtgagatgtttcaggcatgtttgtagaattacctttataatctacttcaggagttatagggtttgtgttaatgttttcattttggtttctgcctgtcttgttttgaataactgaatcccaggaagaagtactgttagcccacagacgggtatagtttgcttttgttccaggagacaaagaaaaaactgttgtcatcagaaaggcaagatgtaggtaatgtcctgtgtgttccatgtccgtgggcatgcttggcaatctgttgggatagcaatataatttgttagtttgtgaaagaataatggatcctagttttggtaattgtagttaaaagatagtgttgagatgttacaagtaaactacaagcttatgcctaatattcgctaccctgaattccttctcaactaaatttcttttctattcagctatgtatgaagaagcattttaatttctattaacacttttagatgctagaagttagcattacaaataaatattaatcattttaagtggactatcatggctttatatagttttcttcctttgaagcgtgctagacttctgctttgagtcagttagttctgcttttacttttctgattccttctttaaaaaaaaaaaaaaattaaggatcattcttacagaaactacccaccctctaacctgtcaccaatctttacagaagaaatgtggccttgagcttcttgcttcatgtatgaaataaatgcaaatttttttggtggaaagaggggaagtttggtagcaaccaaaagaaactgaacttcaaatagaaattcaaggtgttctttttttttcttgggtgttcatcttgaagcttagaataaagctggtacttagaaatacatttgtaagtgtatttgtgaacgcaattttactgtggtggttgtctcttttcatttatatttccctggactgactgtgtctttctgaaggcaaaggcataccagttttctcaacctaaaaatctgaagaaaaaaaaaaaaaaacagcaaatttcctctgagtagacttaaaagttcaacaaaagttgctgggttttcttttaaagcatcatttatacctagcattttttctgattttgacataattgtaaaaaaaaatgtgtaataaaatagaaatagagcatcaggatcttgatgatttgggatgaagtggcaggttataagcatctcaacagataattgaaaatgttgaatttccgctttggccctgagcttgctggaaactagtacaaaaaggagacaagttatattatacattttttaaatctaccaaatgattgatttaaatagaaatggcatatcttagaatttaacagttccatgtactgctaacccagcaggaaagatttataatcattattaaggtatcttataataatataccagtttgtcttgagctacttttgaaaggagtattttattgttagcatttatttgaatgaactaaaagcaaaactatattgttctcctgagatttactaaatgaaattgcctggttaagaaccctacgtatgctatagaaattcttctcaaatgtacttaggagtccttttatttaaaaaaaaaaaaaaaaggcagattcttacctagctagtataggtagggcctgaaagtctttgtttccaaaccaactcctaagcaacatggatgccactgctagtcaggcttttgaacatcaaggttttataagaaatggttgttatatgtcattggctgacatttgtatactattaaaatacagaaattgaaaataagaaatgtgatacgttgagttatgcaaacaaaagtagcatgtaataaacaatgctaactggagactatatttcatattaatagtagggaggaaaaactattaaatattccaggattaagattactttttagattatgacctttagtagacaattaaaggcccaagtcactggcttttgtataatagtgttcagctttaatttttaagtttagtgacataaatctttggatatttcatgattcttccacaaaaagaaatacttgaaattggattagcaagtaatttccatctttttatactagactggacttctgtattagatgctagaatgatttaaagtagattattcttttcacattagttcattaacagtgtagtatacatcatagtattggtacacattttaacagtgcttaccacggaacagataataggcctgctgttgattgtcttcagccagatgtactgcagtgcccaaataaacaaactgtatgacaaaatgagactttctcttgcccttacaaatgcctgagaattgaggactgtttttactccagtttatgccttggaggccaggttgtgttatcagaagttttcttatatctgatcattttcagtagaatttattttcagtagaatttgtaatgtccaagcattagtaatgagaaatttattttttaacttttgaaaaataacaaaacatttccagtttacttgaggaaaccaaacttagatccttcgtaatcctaatttaaaactccatggcgatggcaaattttttcatttctaacttaaaatttatgtaacaggacagaaaaaaaaagtatacattttcagtcacaattctagtttgttagtgagattcttacacactttgatagcatttcctcgaacactaatctgtcagacgttagaagtgaaaaggcataagaaaagccgtatatatatgacctaccttacaaaatgcttggtcaaaatctgattataacgtgattttgataaaccacttcttttcttgtcttctttttaaagcagaatagacttggagaatatgagccttaaagtaaatctgcagtaaaaaaggatatgtgcagctagttttccacttttaaaaccaaaccacagatgacacatttcctttccactgcaactaaagcacatgtcacaggagggaaaaaaaaaaaaacaacgaaaaagctccaacttctctagttggccactggcatgacaggaggctttgtagaaccaatccccgcctccagagcagggagggttttccacttaatgccttttgacagtatgctcattctataggcctgctacatgctttagtgtcattcaaaagaggttttgaaatggtatcttccatttcaaatcttctctaaaagacttatttgaaatctacagactgatttgaaaatgtgagtttggagtccatgggatactgatcagataatgtaacaattgtggaactgcagcaattatttgagaaaatatctagtaaacttagattatatgggacagaaaatgctttcgtgtggtgtagtgtgtgtatacacacacacacacacacacacacacacacacacaactgtcaaacatcctgtcatcacctcaagtttaacatgactgaaacagactttaagaactaggtatgggctgaacacggtggctcacacctgtaatcccagcacgttgggagggttgacgcaggcagatcacttgaggccaggagttcaagaccagcctggccaacatagagaaaacctgtctctactaaaaatataaaaattaaccaggcagggtagcatgcacctgtagtcccacctacttgggaggctgagacaggagaatagcttgaacccgggacgtggaggctgcagagatcatgagatcttggctgcatgagctaagatcatgccactgcactccagccaggaagacagagtaagactctgtctcaaaaaaaaaaaaaaaaaaaaaaaaaaaaaaaaaaagaactggatatggcagcacatatctgtaatcccagctactaggtaggttgaggtaggaggatcactggtggagcccaggagttcaaatccagcctgggtaacatagcaagactccatctcttaaaaattaattaaattaatgaaataaaaagaactttattttttctttaaaggaggctgcctgtgacagtcttcttgtttctgttcatgatagcaacattctaatatcagaggcttagtatacaacacatcattttaatttaagtcctctcagtcctgatcagactttgaatcatgttggtccttccttcatattgttggatcagtttctttttccctgtttttactgtcaacagtactattttagatccttatcaggtcatacctagactctacagtgccttttcggtagccctgaatccttcttatatcttgtatacatcactgtctttggtcataccaccctttctttaagggaaaataaaaccggttgaacagttccctaatacatacaacaatgattcagaaatgtttgtgtacataaacatcagatgagaagattgtttaaaaattataaaagcaggacatggtggctcacacctgtaatctcagcactttgggaggctgaggcgggaggattacttgagccacagaaattcgagaccagcctgggcagcatggcaaaatcctgtctctacaaaaaatacaaaaaaacaaaaacaaaaaactagccgggcatggtggcgcttatctgtagtcccagctactcaggaggctgaggtgggaggatcacctgagcctggggaggtcaaggctacagtgagctgtgaccgtgccactgcagtccagcctgagttaagggaaaaaaaaaaaagataaaaatttccaggccccactacatagatccatatttagtaggtccaggttgggaccaggaaactgcatttttatcaagcaccacagttgattctgacgccagtagtccacagaacatatgctgagaaatggtgagcccctagtagaaaacctaagccctttggttgggcagttatggtctctccacaatttgactattctgtattttcccagctttatctctcaaaacttctctacctgaatcctccattctggctagactagctgtctcttcaacacatctagttacctgtttcttttcctttttgcctttctccataaggcctgcccagtcctcttgctgagtctgcattcctccttacctgattcagccactgtatcttctatgtagctttcactgactgcccagtttgtgttaatctctctctctctctcctttgtcttaataacagtattttctctgcatttcctttgataagtgattactttctacctcatatcttctatcttgaaatatttgtgttgttttaaaatcatttgacttgtcatatttttatcttattttctcccaacaagattaaaaattctgaggtgaagttttttattgatacatgataatttgtacatattaatggagtatgtgtgatttttttggttttttttgtttttgtttttgttggaatctcgctctatcgcccaggctggagtgcagtggcacaatctcagctcactgcaaactcccctcccaggttcaagcaattctcctgcctcagcctcccaagtagctggggctacaggcacgtgccaccacgcccagctaatttttgtatttttagtagagacagggtttcaccctgttggccaggctagtcttgacctcctgacctcaggtgatctgcccgtcttggcctcccaaagtgctgggattgcaggcgtgagccaccatgccctgcctgtatgtgtgatattttgatacatgcatataatgtgtaatgattaaatcagggtgattaggatatccattgcctcaaagaaaagaaattgtttcgtctagctgttttgaaatatacaatgttattattaactagtcaccttactatgaatagtagaacttgttccttctatctaattctaacaatacatatattatttattttattattatttttttaagacagtctcactgttgcccaggctgaagtgcagtggtacaatctcagctcgctgcagcctctgcctcccaggtccaagtgattctcgtgcctcagcctcccaagtagctgggattacagacatgtaccaccatgcctggctgatttttgtatttttagtagagacagcgttttgccatgttggccaggctggtctcgaactcctggccttatgtaacccacctgcctcagcctcccagagtgctgggaatacaggcgtgagccactgtgcccagccctgattatatttttatatccattaaccaacctctgaggtaaagatttattttaacttacttagtagtattatcaccagaatcatcacatatggaaaactttgggcctaagttaacatagattgttttgatttgaaactttggtaccattacttcagggctttttcatggtcctcactgtggctgctcccatttattagtattcttttggttttaagcaacatatgacctaatatggcttaatcaaaaaatggtatttattggcttatgtaactgagcagtcctgggataaatttgaccccaggagaggctttatctcatacacaaatgatatggccagggttccagtttgtctatttctcagctccttctcttcagtcttttgggaggctcttcttttatatcccaaaatatgagctagcaactcctagggctacgtattcccttgtttataaacaccaggaaagaaatatctcaaatcccaacaatttaagctaaactacctgaactgggcctctttggccctggttgtcctggtttgaataatgtgttcattgctgaatcagtctgtgatcaaggtgggataaatggattggctaaaaccatctcactccagagctccagatgggtcattcctaccagactattcgcctaaggagtttggtgggccctgcaggcaaccaactaattcccactgttttcttcctttcttgactcatgggcaaattttttattgttgtcgtggctcaaaatttttgaattggagatttgtctcttctcttagccttatttctcagtgtccaaaaaacaactgatttaaaaaatgaatccagactttgaagaattgttttatattattctctctagaaaatgaatcataaaataaaattgattagtggcatctgtatatttattttaaacactgctaataatctttgtcttttttgtcattttccttaggttcaaaactggtcaaatcaatggtgatttgctgatataccatgtcttactgactttaaagccatattatgcaaagccatatgaaattgtagtggaccttacccataccgggcctagcaatcgctttaaaacagactttctctctaagtggtttgttgtttttcctggctttgcttacgacaacgtctccgcagtctatatctataactgtaactcctgggtcagggagtacaccaagtatcatgagcggctgctgactggcctcaaaggtagcaaaaggcttgttttcatagactgtcctgggaaactggctgagcacatagagcatgaacaacagaaactacctgctgccaccttggctttagaagaggacctgaaggtattccacaatgctctcaagctagctcacaaagacaccaaagtttctattaaagtaagttccagtctgtgttttgtaaacgattcattgcttttcttgactaactagactatatcctggcctccctaggtgtcctacccctatagtggtgtataaaatgtcacgtaaggctgtcgcggtggctcacgcctgtaatccaagcactttgggatgtcaaggtgggcagatcacgtgaggtcaggagttcaagaccagcctggccaacacggtgaaaccccgtctctactaaaaatacaaacattagccgggtatggtggtgggcacctgtaatctcagctacttggaggctgaggcaggagaatcgcttgaacccgggaggtggaggttgcagtgagccgagattgcgccactgcactccagcctgggcaacagagggacgctctgtctcaaaaaataaaaggttatgtaaatctagatgtaggaagaccaacatttgtgtcatcatggaggtcctgtggaggatatgagacgtatacattttattctagcttaggctggaagtagaagagtgttttggagagggcaatttgttatgtcattcaaattgtaggaatgtgtggagagtagaaattacctaatgagagttctgattattacatgcttttttcagagtgaggaacatgaaccttcaggataaaatcagtacttttctataagattgtttgttttgttttgttttgttttttgatatggagtctcactctgttgcctaggctggagtgcagtggcgtgatctcagagtgcagtggcgtgatctcagagtgcagtggcatgatcttggctcactgcaacctctgcctcccaggttcaagcgattctgctgcctcagcctccccagtagctgggattataggcgcccaccgccacggcaggctagtttttgtaggtttagtagagacaaggttgttggccaggctgatcacgaactcctgacctcaagtgatctgcccacctcggcctcccaaagtgctgggattacagggatgagccactgcacccggccttctataagattcttgacctttttaaaaaggaaaattaaaaaatttttaaatgttttttgtttcttttgagaacatttatcataataattactgaaccatttgaatatacaatggtgggaactcttccttaaatggcatagtgttttgtttggttggttggtttctggagccttttagaattttatgtaaaagagtttaattcttctccacttcaccccgtcaccaccactttccaggttggttctactgctgtccaagtaacttcagcagagcgaacaaaagtcctagggcaatcagtctttctaaatgacatttattatgcttcggaaattgaagaaatctgcctagtagatgagaaccagttcaccttaaccattgcaaaccagggcacgccgctcaccttcatgcaccaggagtgtgaagccattgtccagtctatcattcatatccggacccgctgggaactgtcacagcccgactctatcccccaacacaccaagattcggccaaaagatgtccctgggacactgctcaatatcgcattacttaatttaggcagttctgacccgagtttacggtaggttttttaaaattctcttcagtttgatttggggtttgttgcttttaaaatgagaccatttaatgaattttaaaacagcctctaccttaatattgtaaattggaaggtatgcagtgttggttaaccactgtgacctcatcaagttgtggggtattcacatgaactgtggaattccaaacagggtgattcacactaaaccaatatatgtcctttctccatcatgtaaaacaacacgacatagcagatttttttttccaaagtatcctaaattaagtttttcttcctctaagtcctctaatttttttccattttcagaagtatatcactatttagtttaaaagtcaagtcagattattgctttacaaaagaaggcctaatgttcaataacttggtaacattattgcatactttccacctacatcactcttaacaaaattctcaaaataaatcttaagacaaataagtcatctgagcagagtgtaattggttccatttaggcttaataacttgaatatgcatgtggaaagagcatggctgtggagtgagtagatgtggtttgaacagatatgccactttctagctatgtactttgagcaagatactgaagttttcagatatctagtttccttatttgtgaaataaaggtaattgcctttcttatatacccacaaaagcttaaaaaatagtatgtgtagtagtatagtatagcaaactagcaaatagtttatacttagtaagtagtattttcttatcttttccctccctgccagcatctccttgcaccctttctcccttttctcccctctccttaccaagttaggataattctttgtctcaagtaccctgagactttgaagatttttcagatgtaaattcttaacttctgaaaattttccctgaggataacatagcccaggttttatagtgggccttttaggattccaaattctcctttacttaaagggaaaaagaagaaaatcaagatatgtttacttggatgggcttcagaaattgtacataagattttgtgtatgctttgcttcctttatctcataggtgtctgtgacacctgtcctgggttgaggaagtccaattctttataagtgttgaaatacacaggataaaagttttgtcaaaattgtataacttagaattcctgggaattagtaaaagatacaagctgagcactggcactgtagtcccagctactcgggaggctgaggcgggaggacagcttgagctcaggagttcaaggctgcagtgtgctataatcatgtctgtgaatagccaatgcacaccagcctggggaacatagtgagactctgactaaaagttttttaaaaaagaaaaaagatatgtaaacagaaataataacactaattttcacattttaggaaaatggagctataagcctgcctttaatttctaattcaaagatcttcattgaaaaatacaaccttttaacaattattagcctgggtaaacctgtattcttctctagtgacctaaagcaatctctgacagcttctgctttttgctgaagcatgtcatcccagagaaaaagcctttaggcagacttaaattccagtggctttttttccctatatggttgttgcatcaatatagtagcatgataaacattcagaggtaaggaaaacctgacagttactgaacaaactatttcctttactggacaggggagaaaattaaaatttttaaattgagtctgagtcttttaggctgtctcctaaattgcttaaatatattttcagacatttgtaagtgatgtttggtctcaatgaaacctggatattatagtttttttccatattggtggttatatatgatgtaatgaggtcatagagggaaaaatgggaggacttaattataagttaattttgtttttaaccttcagtttgtagggtaacttttaggacacccagaaagaagttcagcagatcctgattaaagattttcacattctaatttgatgaagggaagggccatctgatatctgtccctatgatccccattataactggatctagtgggaaagagaaccagaatttgagttttggctttgctaaaaatgtatggtgtgccttattctgacttaatttctattgatccacattaggaccataagtcctctcatattttatgtctcagtgagatgtattttaggaaagcctataccccgcccctctgtcataggagcctcacagtgctcttatggttatatcaagtgtgtccctttttataaaatccctaaatgattaaggggtattttggttttactgtagaattataacatcttatttctaactgatcataaaatttaaaaatagttgatcatactttgtaacagaatcacaaattgtatgttatgaaaaaattttggaactataaggaaaaatacgttttaaaacaacttcatttgtgttttctcctaggtcagctgcctataatcttctgtgtgccttaacttgtacctttaatttaaaaatcgagggccagttactagagacatcaggtttatgtatccctgccaacaacaccctctttattgtctctattagtaagacactggcagccaatgagccacacctcacgttagaatttttggaagagtgtatttctggatttagcaaatctagtaagtaatgataattttctttaatactaacaattattctaagagaattcaaagaaaaccctttcatttcagaattttccagtgaagactttcacttacatttttactttttttcctcttctgattttatatctgtggtatcctgtaactgaaggaactctgaaggaactttttggtaggccacattgagaaatccaccaaaattctgataataaaagcaaagcggcaagagtttggtactttacacacctctggaccacttacaaagtattttcttcactgttgcagtttaattagcttcagcatttctcttcatagcagaaaagtccacataagtatccatgttgcctccttaattttagagaactagtcattttctcttttctttaggttgactttgaacaatgaatttattgtaaatgtacagttcacggagagcacagtggcacataatacagggcccagagtcagttctgactttgttttaactaagtcttataaatttaatatccactctttatatttgtccatctttatatcctatagttttataaatgttgatcttctcccagcatatttcctgaccttttcttccctttcctttccctgtaatatataaaacttttttttctgcattcaaacacatttcttgacttttatatattagataattaaaagcttcagcaattcactaagactctttgtcaggtaagagatgtaggactataaccctaacaaaaaaatgtgtaggactgacaaaacaagaaaagtataaactttattcataaatattaatatgagagaagatttgagtgaatgtaaaggcatattgtgttcctgcatgaacagttcttcccagattattacaaatttaatgtaatttcatcaaaataaccatgggatttgaggattgagaatggagatagaacttaaatgattctaaattctacataaaagtgcaataatagctaagaaaatattgaaaggaaagagacttgagacttaatagtacagatgtctgaacactttatagcagtacaataattaaaacatacatgtgcaagaatcagccatcagatcagtttaagagaaacagattgataaagaagcatcacaaactgatgagggagagattaaatcatttaataaatgaggctgggaaatgacttaaattaggtcttcgtcttcaccgtacaccataagataccaagtatgttctgcctgtatttaagagttgagtagggctgtgtgtggtggctctcgcctgtaatcccagcactttgggaggttgaggcaagaggattgtggcaggaggattgcttgagccccagaggtcagggctatagtgagctatcatcgtaccactgcactccagcctggatgatagagtgagacccttctctattaaaaaaaaaaaaaaaaaaaaaaaaaaaaaaaaaaagttgtatataaaagcttggaaccattttaaaaagaagaggaacaagtgaatatttaattgctttctagatgagtaaggacatatgaagtaaaaaagtgataggatgaaacaaaggaaatagcgaacagatttgactacataaaacttcaaaacatagctactcaaaaataaacacaagtgaagataattaaaaactaggaaatacacttggagcaaatatgagaaatgattaatatccttaatcggccagacgcggtggctcacgcctgtaatcccagcactttgggaggctgaggtgggtggatcacaaggtaaggagttcgagaccagcctggccaatatggtgaaatcccctctctactaaaaatacaaaaattagccgggctcggtggtacatgcctgtagtcccagctactcaggaggctgaggcaggagaattgcttgaacccaggaggcagaggttgcagtgagccgagatcactccactgcactccagcctgggcaacagagggagactctgtctcaaaataaataaatgaatgaataaatgaatgaatgaatgaataaaatccttaatcatgaagggtgctgaccgattaataaaaagtggattaacagtaacatacagatcatggttttttttttttttttattatactctaagttttagggtacatgtgcacattgtgcaggttagttacatatgtatacatgtgccatgctggtgcgctgcacccactactgtgtcatctagcattaggtatatctcccaatgctatccctcccccctcccccgaccccaccacagtccccagagtgtgatattccccttcctgtgtccatgtgatctcattgttcaattcccacctatgagtgagaatatgcggtgtttggttttttgttcttgcgatagtttactgagaatgatggtttccaatttcatccatgtccctacaaaggatatgaactcatcattttttatgttttttaaaaaagaatatttgtacaaaaaaagaaaaaagccaggcaccatggcacatgcctgtaatcccacctgctcaggaggatcgctaagcccaggagtttgagaccagcctggacaacatagtgaggcccccatctcaaaaagaatatttatattttaagaaattcactaataaaagccaattgaaagaatagtgagataatcagttatcagcttggcaaagattttttttttaagatccattcctggtggtctgtggaattgtgagtagaggcaatttttctagaaaggcatttggaagtggataacaagaccttaagactattcataccttttggcctcataattctgctttttagcatttatcctaaagaattaatgttaaaatgtttattatagcattatttttatgtagatttttaaattgaggtatatcttgtcatcagtaaagtgcaagatcttaagtcaacagcttgatgaacttctacatgcaaatacatcatgaaagtatctccagatctagacatagaacatttctagcatccagagggatattctcagtaccctcccttcaccaagagtaaacactattatgacctctattgcacagatttattttgcctactttagaacttcatatgacattatttataatagcaaaaaaatgaacaggccaaaagtcaaagaataaggaactgattaaattattggttctccatctgatggaataatatgaagccattgaaaaatggctttgttacagaatttcagtttggaagatgaaaaggttctagagatggatggtggtgatggctgcacaatgatttgaatgtactcagtgccactgaactgtgcccttcaaaatgggtaaagccacggaactgtacatttaaaaatagttaaaatggtaaattttgtgttgtgtatattttaccacaattttaaaaactctttgagactttaggtaaagtgtatagataaatttttgtacaatttttgtcttataaatgtgaagctttttcaagtaagtttaaaagaagtttgcagaatttgtaatgttgaataaataatctcagtataggccaggggtggtggctcacgcctgtaatcccagcactttgggaggccgaggcgggcagatcacgaggtcaggagattgagaccatcctggctaacacagtgaaaccccgtctctactcaaaatatgaaaaaaaatttgccgggcgtggtggtgggcgcctgtagtcccagctactcgggaggctgaggcaggagaatggtgtgaacctgtgaacccgggaggcggaacttgcagtgagccgagatcgctcctctgcactccagcctgggcgacagaggagactccatctcaaaaaaaaaaaaaatgaataatctcagtataatcactgaaaaaaatattcagagcctactgcatgtatagcataatccccgtttttgcgggggagtgggagtgggttatacctgtgtacacacacataaatgtacattaactctacataaatttgaaagcctgaggagagatgagatgatacaccaatgttaatacagttttcattttgtggtgatgctttccttttaccaaactttctatgattaccacatttccttttataatgagaataaaacaactttttaacaagaaaggactaaaatggaggaaaataagacaaaacttttcaaaaattggcttactggcttttaaaattactttcttcaaggactgttctttcttcgcctctacaaaaatatatttgccaagtgtcttttctccaggcctgattctaggtaatagtctttaccttttaccattttttccccgaattctttatgttaaataattgttgatgtgattttcattgaccatcacatgctaatagtgtatttttttccaggtattgaattgaaacacctttgtttggaatacatgactccatggctgtcaaatctagttcgtttttgcaagcataatgatgatgccaaacgacaaagagttactgctattcttgacaagctgataacaatgaccatcaatgaaaaacagatgtacccatctattcaagcaaaaatatggggaagccttgggcaggtattgagtttgctcaaatatttatctagtatctcctttgtgcacatatttatctggtgccacattgggcaaagcactgcgctagacactagggatagagttgtaaaaaacacagtttcctccttcagaaagcatgtagacactcacccagctcttcatctggttcaaaattgtaaatgtctagtgcatgtctcagagccagagaaaagctagttatttgcacagtctccttcaaggcataattatatatatatatatatatataattatgccttgaaggagactgtgcaaataactagattttatatatatattatatagaactgtagaaatctggtgacatttctagtgctttattctagttctctacattccaaaggtgtcagtagatgtttcttcttattgatgctatttgggacatctgctttcatttatagttctacataagaatgccaatattaaaataggatataatgtaaattttatttttatctgacaagaattaggcatatcatttcttcaaagtaatcatttaaggaaataatgccctcactcaaacactgctgctcctcctccaaataattagaaataaccttggagccagtgttgcagccctagaaaacatcctggtacttaatgtcatttcctatattttatttttttttgagactgagtctcgctctgtcacccaggctggagtgcagtggtacagtctcggctcattgcaacctctgcctcccaggctcaagtgacccttccacctcagcctcccaagtagctgggcctacaggtgcacaccaacacacctggctaatttttgtatttttttttttttttttttttagagatagggttttgccatgttgcccaggctggtcttgaactcctggcctcaagcaatccgcccgcctcagcctccccaagtgctgggattacaagcgtgagccactgcacccagctctgtattttcaaattactattttatattgatgctacattactgtcttagaaaagcatagagatactttgcaagtgactgaagatagtattgatagagatttaaaatttttgaataccaatctcttaatctctgaaggagtcaaatgaatatactcatcctttactggatattttataataaattgtatttactgacaggcctgtaaataaaatctagtatttttgaggcctcaggtaaaatagaattttcatattgattaggctgttccaatgaatattttttaattaaaaattaaattggtagagtgattaaaaacatgttattttccttcttcaactagattacagatctgcttgatgttgtactagacagtttcatcaaaaccagtgcaacaggtggcttgggatcaataaaagctgaggtgatggcagatactgctgtagctttggcttctggaaatgtgaaattggtttcaagcaaggtaatcacttttcttttgccttctgtactatagcatatctgttttatcatcaggaggttttttgttttgtaattacttttaaattaaactgaacttttttgtgctaaaactttgagtcccatgtttttttttttaaaaaaaaaaatcctgcttctttacaggttattggaaggatgtgcaaaataattgacaagacatgcttatctccaactcctactttagaacaacatcttatgtgggatgatattgctattttagcacgctacatgctgatgctgtccttcaacaattcccttgatgtggcagctcatcttccctacctcttccacgttgttactttcttagtagccacaggtccgctctcccttagagcttccacacatggactggtcattaatatcattcactctctgtgtacttgttcacagcttcattttagtggtaagttctaggaaaggaatttgtgtttaccagttcctttctccattttacttcacctgatcaatatagattatcttatttatgtttgtgctctaacaccaagttgctaatttaagcctccagtaatgacatgaaatattaccaaaaagaaaataaattacttccattccatatcaagctatagtaaagattttctatgcatacttgtcatgtagagttatcccataagcggaatactcagtgccagttgaccatgttcagttaccagcactaatttgtagataaatgaagcaaggagcattaatacaatgtatctagaggtttgatttagggaacatgattatgtaatttttatatggtattcaaattttctaaattcaaaatgaaacatggaactttagaaattaaaaagtaatattttctgtctttacttgttcctttattctcttacagaagagaccaagcaagttttgagactcagtctgacagagttctcattacccaaattttacttgctgtttggcattagcaaagtcaagtcagctgctgtcattgccttccgttccagttaccgggacaggtcattctctcctggctcctatgagagagagacttttgctttgacatccttggaaacagtcacagaagctttgttggagatcatggaggtatagaagccaaaatgataagaaactaagttaaaatctttttttaaaaatatgttaatactatatagaagaaatattggtttattgtgctattttgtacttaatgcttaaataaaaacacttgcatggactgtgttattggtaacaggtcacttaatgacatcataataaacattatttaaacagttctaaaaacatttatgtacaatatgtattcagagtatccccttttttaggcatgcatgagagatattccaacgtgcaagtggctggaccagtggacagaactagctcaaaggtatgtcctaaattaaatataagttgtaaaaatatgcatattgttgaaaatacagctattactgtatgatcaatgttataatttattatttagtatatataaacacaaaggtttttataagttctgtggatcttttaattgcagatttgcattccaatataatccatccctgcaaccaagagctcttgttgtctttgggtgtattagcaaacgagtgtctcatgggcagataaagcagataatccgtattcttagcaaggtacctgttccgccctcacttctcccaaatatttatggttctcaagttgtaaagcatatctttcatttttctaaaagacgtttaaatttgaggtcaatgaaatatcttatatgttacttattaagcctttaaaatgtattttgattatttattgtaattctttgaagaagtcttctctaaagaagctgtctttatatgtaaactctgattacttcattaaggaagatgtctttaaaataaaatatgttgcctcttttgctaagcaggtacacttagtattttaccagttttcaaagcatttaattatatggtaagactatagccttgcataaaattatttaatttgtaattactataataatgtctgactcttataatgtagaaatgtcaaaaaataagaaaacaaatgtacattaagctagctaccaagatcaccatagcatgagaaatcattctagcatttattaaataagtaaatgttcctgaattcattccgagattcagtttaggagttaatgttttatttcaatgaaagtaaaataaaaaattctgttttcctaaaaggcacttgagagttgcttaaaaggacctgacacttacaacagtcaagttctgatagaagctacagtaatagcactaaccaaattacagccacttcttaataaggtaattactgtatagaaaatgagtgcattcattttgggtatcagtgttgaatgttactttctttcaaagagtttagaaaataagatgaattgagaataagttataaagaaaaaactatagttaaagtagaacctcttaaagtttagttgtttgaagtagtcatattagaagaagagtaagtatggatagtatgttctcaagcgcttgtaagtttttggtctcatcagtgctaaaggaaagataggtatatattcttaattattttatcttataactattaattatctgctattgccaagtactgttttaggcgctagagatagagtactaacaaagcccataaaactcactgccttcatggagcttactttctggggtgggtgtggaggttggggagtgaatggataatgaagtaaacaaaatacgtagtatgttagtgattattactatggagaaattaaagctgggagaagtatacttgatcgtcataagagtttgggtgccaaatgaagattatatttaaaaggagtaaaatgaagtggccactgttttaggatggtctgaccttatcccatttttatatttaagatatctggaaatcatgtttttgtattaataaaatgaaaaagattcgataatggcatggtattaccatccagttctaaagtggtttaattctgtgatttgagtacaaaggtatgccagacttgggagaaataacagagaaataatacctgttatattcctggtttgtctacaagcattctaattttgtattatacaaaatggttctctggtccccatcttctaagtgaaaatgagctcagaagggctaaataacttgcccaaagtcacatacctaataaaagaaccatgattctaatgtgatactatttgactctaaagtccatgtattttccctaatatcacagtgctaagtaaagattgccagtaataaatacttttaattcagagcagcaagagattaccatactggttaagagtgacaagaagttgaaaagacagtttaaaataaagttaaagggaaacataggagttaatgtaggtagagagaaagggagagagctgcacaagaatgccaggacaatggagggaaggtgggtagaacattctagttgtaatggagaagcttttcaaaggaatcgagagagggaaagttgtgaggactggatagacctcatctcacattcagcattgttcaaaagagtttggaaatgtacagtttttaagcagacaagtcatacgatgaaagcaggacttagctcctggtggtagtgtgcacagtggattggagtagggagaaactgaagtaaaaagaatccacctttataataaagaaggttggcatgtggtaatgtcattagcaataagaaagaaatgacaaaagatacaaaagagactactctagaagaatcaacaaaccttggtgactggatttagaaatcaaagaacagggagaagtcaaaggaggtgctaagtaacgttctcagtccagctaacagtgtctttagttatacatatggaaaagtgaagagcttactcatatctttatcttccccaaaagagaaaacatgggtaatttaggaagataagctgctttatttttaactgcagtgtgttttgaaagagactatgtcatgattcatcttactagcctcaaacatatcttctttgccaggactcgcctctgcacaaagccctcttttgggtagctgtggctgtgctgcagcttgatgaggtcaacttgtattcagcaggtaccgcacttcttgaacaaaacctgcatactttagatagtctccgtatattcaatgacaaggtaagcaaactttgccttgaggttcctagattactcaaatttagtactcttccatcttttcttgttgctattcttttaaaatcacaagaagtccataacttaagtaggaatttgtataatgtaacttattgtgagtatatttccttaccagctcataaagaactatgtaaacttgaatgcatattttttacataaaaatagcaaaaaaaaaaaaacaaaaaaaaaacagtactggcctaatactagtagaattacagaataaggataaataatacatgatcatccttacagaatgagcataaacaatacatggtaataatattaatagctaccatgccaggccgtatgctaaacactatacatttatttttaattttcataaccttaaggtaaaggttagcattctctgccccccatttcacacgtgaagaaataatctaaaagtaatcttagttttacttaataatgccacttaatgaaaaatacgtataattcatagtagataaggaagttggagagtctaaaggaaacttttgggtacttaattttactagtttttttattctgtctaatcttactttaaaatataccattagtggccaggagtggtggctcatacctgtagtcccagcactttgggaggccaagacaggtggatcagttgagctcaggagttagagaacagcctgggcaacttgcaaaaccccatctctacaaaaaaggcaaaaattagctaggcatggtggcatgcacctacaatcccagctactcgggaggtgaggtaggaggattgcttgagcctgggaggcagaggttgcagtgagctgagatcacgccactgcactccagcttgggcaacagagcaagaccctgtctccaaaaaaaagtgtgtatacatatattacatacacacatatatatgtaatgtatgtgtatatatatatataaagtgtgtgtgtgtgtgtgtgtgtgtgtacacacataaaatatgtaaaatccaactccaattaaggttaataaatgttaggaggggtgctaatggggtgtgtgtgtgtgtgtgcacgtgtgcatgtgtgtgtgtatatatatatgaacatgggcaaattacttcttagttcctttctaatttgtaaaatggagatctaattggggttggattttagttcatagagaatagaggagagaataaaatagtatgaaattacgtcccttttgtctttggataaaaatgggaagggtctaggagaaaagaggggaatgtttttaaaagaatgtgtatatacagtgagatttgcttgaagtgaaattaactgaactgtgggtacaaagaacaggattatggttttaagtgtaaaaagatacttggtctaaacattattagttcagtctaccagatgtagtgtgaacctggaacagatatgggtctgaaaaatatagaagcaaaattttagaggtaagaggtcttatggagtttattaatcagacctccattttgcaaattagaaaggaactaagaagttaagtaacttgcccatgcttgtacatctgttttgggactagaacccctctgtcctaattctcattgccgtttttctaaaactgttttgggacagtggtggtcagcgatatctagttgttggctatttatatgttaagaatatttgcaaattggccgggtgcaatggcgcatgtttgtaattccagcactctgggaggccgagttgggaggatcacttgaggttaggagttcgagaccagcctggccaacatggtgacaccctgtctctactaaaaatacaaaaattagccagggtggcacatgtttgtaactccagcgacctgggaggctgaggtgggaagatctcttgaacccaggaggttgcagtgagccaaggtggtgccactgcactccagcctgggcgacagagtaagactccatctcaaaaaaagaatatttgcaaatggagcattgcaaatggggcatctgcctcggtattttcatcttcaaaacagcccagtagcgggagctaatattgattctagtgccctttggatgctaggcatcagagttaataagcatgttaaaagtcaccgggatgtaaattgacagtcatttattttgtattgtaaataaaagtgatttcatcttccaccatcttcttatttatatgcttgactgtcttgcaccagttaatttgtagtagctaaaatgttctgtggttttctgcagtcaactgaaaataatttctctcaaattgaaaggattacttatcttgtcatactattgaacacaaaattaagtgagcctttaaagaaagctactgtgtgaacctcatcaaccatctcatgattatctttaatagagtccagaggaagtatttatggcaatccggaatcctctggagtggcactgcaagcaaatggatcattttgttggactcaatttcaactctaactttaactttgcattggttggacaccttttaaaaggtaaaaaagccttatttagaatatttttatgaagtactattaagaaaccagaagtaatttgaataagtgattacttgaaataaattgaagtaagttagcccttatgtcttactttaaatgcaaactaggccaggcgtggtggctcacgtctgtaataccaacattttgggaggctgaggcaggaggatcacttgaggctaggagtttgaggccagcctgggcaacatagtgagacttcatctctacagaaaatttaaaaattagccaggcatggtggcacgtgcttgtagtcccagctacttaggaggcatagatggaaggattgcttgagcctgggaagtcgaggctacagtgagccgtgatcacaccactgcactcagccctaggtaacagagtgagactttgtctcaaaaaataaataaataaatgcaaactatatctgtcttaatgagttgtgttttattcaatatgtgttttaagagagcttcatttccaattcaaatatcaaatttgcctgaaaaacaaaagagtttattctggctgggtatggtggctcacacctgtagtcccagcactctgggaggccaaagcagaaggatctcttgagcttaggagttcgagaccagcctgggcaatatggtgaaaccccctttctacaaaaaataaaaacattagccaggtgcggtggcacatgcctatagtgccagctacttgggatgctgaggaaggagaatcacttgagcccaggaggtcaaggctgcagtgggccatgatcgtgccactgcactccagcctgggtgacagagtgagaccctgcctttaaaaaaaaaaaaaaaaaagtgttgattcttacaaaaacctacatactgagtctgataatagctatattaatagtaacaatacctaagtatcttactgattttcaaaatgaaacagactgcaaatcactaagtgttatttgaataatttatattagaaaatgttaagagatttgatcacagattttcttcaacttgtttatagtttattgttgattaatactattattttataccattgtacatcacctttctggcaccctattctcacccctttctatattgcttatagccagtgatctccagctattcctcagagcccgctcattcacttcctaacctggttttactccccgttgctgacttcacagcttgttaactttggttcattaacatggggcagtcatggccagagactgcagttaataagaacagcatgtagtggtgggtcagaagcaaagcaggataaagtaagacctgggataaggagctggcatgaaccccagtggtctcagaagtggatttggccacaatagagattcaagctatagcttgagtcaacaattttgtattaatttaaatcataggcttgagggaccatggagattctcccagtttttatgagagagagagagatatgcatacacccactattgtgaatgtatgcatttgatttcactttcttatgaaatttctacaaaaaatattgacagtgttaatctctaaggtcaatggggatttctcaaaaaatactaccttactaaaggataccaagataagtaattgtaactgggctaataaagtgcttaattattctttatatctaaaagaataccaggctgggtgcagcggctcatgcctgtaatcccaacactttgggaggctgaggcaggtggattgcttgaggccaagagttcaagaccagcctggccaacatggtgaaacccctgcttgaaggcaggagttcaagaccagcctggccaacacggtgaaaccccatctctactaaaaatacaaaaattaggcaggtgaggtggtgcaaacctgtagtttcagccactcaggaggctgaggcacaagaatcgcttgaacctgggaggcagaggttgcagtgagccaagatcctaccactgcactccagcctttgtgacagagtgacactctgtcttaaaagacaagaaaagaaaagaagaccagatactttccatgttcaaatcacctatttttaaatgggggaaggattaatgattaaaagctggccaaagatcaaatttatcctctaatcaaccctatttattgggctcttagagcatatacttcctatgtcatcagcttttcttttaattaaaaatgtttttgtattccgcctgcgactcggtcccggcgctgggctgaggggaggggttgtcttaaaagtctctccttccccctgtaggggcggccggcgagtcccagtgagagcggagggtgccagaggtagggggccgagaaacaaagttcccggggctccctccggggccgcggtcggggctgcgcgtttgaccgcccccctcctcgcgaaggcaatggcttccaaactcctgcgcgcggtcatcctcgggccgcccggctcgggcaagggcaccgtgtgccagaggatcgcccagaactttggtctccagcatctctccagcggccacttcttgcgggagaacatcaaggccagcaccgaagttggtgagatggcaaagcagtatatagagaaaagtcttttggttccagaccatgtgatcacacgcctaatgatgtccgagttggagaataggcgtggccagcactggctccttgatggttttcctaggacattaggacaagccgaagccctggacaaaatctgtgaagtggatctagtgatcagtttgaatattccatttgaaacacttaaagatcgtctcagccgccgttggattcaccctcctagcggaagggtatataacctggacttcaatccacctcatgtacatggtattgatgacgtcactggtgaaccattagtccagcaggaggatgataaacccgaagcagttgctgccaggctaagacagtacaaagacgtggcaaagccagtcattgaattatacaagagccgaggagtgctccaccaattttccggaacggagacgaacaaaatctggccctacgtttacacacttttctcaaacaagatcacacctattcagtccaaagaagcatattgaccctgcccaatggaagaaccaggaagatgtggtcattcattcagtagtgtgtgtagtattggtgctgtgtccaaattagaagctagctgaggtagcttgcagcatcttttctagttgaaatggtgaactgataggaaaacaaatgagtagaaagagttcatgaagaggccctcctctgcctttcaaaagggtggtcacctacacatgtttaaggtgtctctgcacatgtctcaagcccatcacaagaaagcaagtacagtgtggatttcaaatggtgtgtaacttcagctccagctggtttttgacagctgttgctgtggtaatattttttacatgtgatggtgatagtctctggttctccccatccccacaaaggctgttgaaccacagcaccaggaagcctgagaatgaatcctgagggctctagcccaggctttgtcccaggctttctggtgtgtgccctcctggtaacagtgaaattgaagctacttactcatagtggttgtttctctagtcttgagtgactgtgtccacagttcatttttttccggtaggaataactccttttctacatccacactccatagagtctctccttttcagacatcctgggatgaaagaatttggcttttttttttttttttttttttacatctgttttcactcttaggcttttaaacaatagttattgctcttatccctctcagattctaataactgagagcgatggggctatattgaatctctgtatgcactgataactgagctatgaagaggatcttattaaactgctggtctgactctatggattgacactgttcctttcttttattgtgaaaaaaaaaacccctgaaagtcttgggaaccccctaaagtcttttgggaatcctcaaaaagcatgggaagttaagtatttagctacataaatgttgtaagatcatatcttatgtatagaagtaataagaccatttggaattactggactaattgaatagttaaggtttctattcgggacaataaaatgtattttgaaagtgctgctaactattgatgctgacagtgtttcactcctatgagtgacccaaacatattataaatatgtggtaaagggaatggagcctgtggggttgagcagaatgttgtactagctgtgcctggactgagtataacagctttatgattatgagaaaacaaattctttatttttttttctgttccaaagattcatcctatggggtggccataaagtctagaattagatactaatattttgtcattcattataacatatcgataaaccatttgttaaaagatttgcctggtttccagacttggtggccaccttgaataattcttgctgtcttctgggaaggatgatgaaatttattcctgctgccttaaaaatatgtatcccttcttcacccatcatgactgtccccagtgagtgtcctttactattcttgggagtgactcctgtctaacttttcatactggcgagaagaaaagaagcctattttaacactttagtggtgttgaaacacattacttactttctgaagatgtcccagtgaatcctctgtcaattcactgccatatgtaatctatatgataaggaatgcatcttccttctaagtactgcccaaactcttgccagctcctctcccattgtcccttcatgtgaatatttcttggctaccttagtggaaatatagatcagtcttctccccatccatcctctcaaacataatgagattgtttactttttagatttatgcagtgaaaatgcccagtcaggtctgaatcgtcagtgcattatattgactctgagcactttagaatttagagttgcaattgaatgccagctgtggagatggggtgcatatcagatatataaataaagctcaggtttgctagggaaccaggtatagagaaaaataagtctgatatgaggaaggaaaattgcacaatttagagtagttatgccatagagaaaatttccacaaactaggaaatgtagagagttattctatagaatactcaaaagaggaaagtatgtgatttttggaaacaggaaaatcttcaaacttctttcttcacttccctttgtgtttagctgaccctccaatgtgatcattgcctttggagtttgggagaggtacgggaagtggcctgatccctgcttccatacttcactcctccatccatccttccctccctcttcccctccagctaaatggacaattctagccaacattgagtcactcaataagtctcaacagtgggtgtgtttgctgagattgtccagcagttgagcagtttggtctcacctccctcgctagttgagaccaaaaagagacaaataactttttcatggtctttgaaacataatgcttatttcgtggtcaatggctttaaaaaaatctgtttcttgttttcttcaacaaactcactagttttcccttaactgatattgtaaaaattaaagtaatcttgaaaatgttttgacaaaagtaaaattaaagggacatcttttcttaaaaaaaaaaatgtttttgtaaaagaaccctattttcaaatgaaatcttaaggagaattataatacatagatttttttttttaatctctgtgctgctttagggaatagaagatctgaaagactatcatgttttttaattttcctcttcctggagtactgtagagttctagggaatattatattctacacatttttggtacttaatcttatacataattaattattctcattcacatatgcatgttttaccttcccaaatggctattcttggaaagtaggagttatatttcctttccttgcagagttgttagtcagggaagaagacctcagcagatgcttgttcaaaaaattaattcttacttgtttgtttgtttgtttgtttgttttttgtagggtacaggcatccttcacctgctattgttgcaagaacagtcagaattttacatacactactaactctggttaacaaacacagaaattgtgacaaatttgaagtgaatacacagagcgtggcctacttagcaggtaaaaacacaaaataaacaaaattaatcttgctacatctatatataaggatcacccaaaaagtacaaatacctataggttttttggcggttgcgtggcagagcagaaagttcacagtctagtcctttagtggtggttacaattttgagagttttgccagaacatttttctgtaggaaaaaatttaattcccattaaaatctgaaatgtgttcccttggtcatctttggttcaagacactacagtggctctctgttatctgtcataaaatctgaatgcttcagtctagcaccctgggtccttaaatagccctctcagttctgttatctttctctaaatttcatgagcctcattttttattaccactccaaatggatgagctattttaagctaatctacttgccatctcctacaagcaactgcctcttcaatattcattccttatgtcattttatctggagtatctgccctatccccaccattccattaaagcttcctatttgctcttatctgatttttgtttctctactcagcaacacttagcacttatgtacaatacaattcttgaacatagttgtttgatagaaagtgctgattctcagtttcacagacttgtatttgttcaacttttttgtttgaaccgtatcatcttgagcaaatcatttaacatctcagtattttttctcattcagcttaataatacctgccctgcctactttgtgtttgttaaagatcaaatgtatattaaagaacttggaaaataaaagatgcttattaaatctctctgtatatttcacatttatgtagtcttccaaaatatgtgcacatttaacaggtactatgctctttaggagactgtaagaagttcatcctgttttaagtcacacttgtgatttgttaaattttttaacctgccaccgttttccttttagctttacttacagtgtctgaagaagttcgaagtcgctgcagcctaaaacatagaaagtcacttcttcttactgatatttcaatggaaaatgttcctatggatacatatcccattcatcatggtgacccttcctataggtaagtggatttactctcctataattacataatcataatcaagtttcaattttccaactaatggaggcaagcagcagagtaatctagaaggtaacatgggagaaatctagagatggcctaggaagagtaagtgaaactcattttataaatgtgtggtattttatgtgggttagtaggaaagttattcttccagtctgattgtgctaatgttaacattagtttgcctctgaagcacagaccaaatgaacaatgaaaagagatgctcttgaaaatattaggttgcaggggaagggcctggggaaaaaaactaacgcgaaatataaacaacacattacgtgcttggatagagaacgaatctatacagatttgtaaaaatacaggcatgctaacacatttgttgtatttactcatatcacacaagttatttaaaagttttctataatgtagacatagatggtaaaaattatatctgctatacatgggtttgggtagtatatttttcagtataatttagagaaatttcatgaaaatggcatcattgggggatttttctgtattttcaattaaataaaaatatctttaaggtttagggacagtgttgaacacagaaaagttatcttctgttcgcaaaactcgtatcattccatttatcaacatcctgctttttgataaaaagacttcaacaatttccttaagattctaacaatgtacgcaaaaatttttcaaacatggtattcaatagtcttactttcgtcagtcccattattatattactttgagatatgccctttttgttatagaaagggtaaaatagtttgcctgtgttcccctgtcaaagtataaattaatatctgattttcttggtttttaaacaattgcctatttagacttaattttttctgatttaaaaaaaatcagtgcaataagttcaaggtcttttatcaacataactacagttaatgtattttatacttgaaaatagctacgagtagattttaagtattctcaccacaaaagataaatatatgaggtaacacatatgttaatttgcttgatttagccattctacaatgtaaacattttatttatttttatttttctttattaattttttttgagacagagtcttgctctgtcgcccaggctggagtgcagtaacacaatctcggctcactacaacctccgcctcctgggttcaagcgattctcctgcctcatcctcccgagtagctgggattacaggcgcgtgccaccatgcccagctaatttttgtatttttgtagagatggggtttcaccatgttgggcaagctggtcttgaactcctgacctcaggtgatccgcctgcctcggcctcccaaagtgttgggattacaggcgtgagccacagcgcccagccaatgtaaacatattttaaaacatcatgttgtacaccaagcttgctcaacccatggcctgcaggccgcacgcagcccaggatggctttgaatgcagcccaacacaaatttgtaaactttcttaaaacattaagtgattttttggggtttttttttttttttaagctcatcaactgtagttagtgttagtgtattttatatgtggcccagtatattcttctaattccagtgtggcccaggaaagctaagagattggacacccctgttgctatacctttttatttgtcagcttttaaaaattgcagtacagatctttttgttcagcatttggtgagtacctactatgtgcaagatactatggcaagaaagttgataattcctagggatacaccaagagtttgtatcctaaagccctttaaagtgcaattttaaaattaattgattgctgttgttaggaaataggacagccacttggaaggagcaaacgatggttgtatttgtcaccatattaattgatttttctctattgttttcatctttcaggacactaaaggagactcagccatggtcctctcccaaaggttctgaaggataccttgcagccacctatccaactgtcggccagaccagtccccgagccaggaaatccatgagcctggacatggggcaaccttctcaggccaacactaagaagttgcttggttagtttatctaaattatgtagattttttttattatttaaaaaaatagatatttttactcttggaaaattatttgaaatttcaggattatcaaaattttccatgtcagtgtagcaaagtttttgatgccatttaaaagagagtttgatagatcagttaagcattataagttgagatagagaaatgagaatgggaccttgaaacagttttttctgaatcttatactaaatattgtgactctccttattttgttttgcctttgctggccagcagggaatgggactctgagacatattagataaatacctataagaaaggaagagtcttgctgcactcaggggatttaatgatatactgtaatacttcccaaaattatcatctgagagaatatatgaatatggtatgaagctgtaatagtactatttgccgtgctttctttgaaaagacaaaaagacatgcttctcaattaccgaaagaaaataggattcttttttttcttttttcttttcttgatatgaagtcttgttctgttcacccaggctggagtgcagtggcgcaatctcagctcactgcaacctctgcctcccgggctcaagcaattctcctgcctcatcctccctagtagctgggtttacaggcacacgtcaccacatctggctaacttttgtatttttagtagagacagagtttcaccatgttggccaggctagtcttgaactcctgacctcaggtgatacaccctcctcggcctcccaaagtgctgagattacaggcatgagccaccatgcccggccggaagataggattcttgaaattaagattgctcagttacatcaacatttatagaatttttgtctctgagaagtacacctgaaatgctgcgagactcatttccattttagtaactgaaagtaaatgaatgaaaaaacccactaggccaggtgcagtggctcacgcccataatcccagcactttgagggactcaggtgggaggattgctcgagtccaggagttcaagaccagcctgggcaacatgacaaaacccatctctacaaaaaatacaaaacttagctgggcatggtgacgagcacctctagtcccagctacttgggaagatcacttgagcccaggaggtgggggtagcagtaagccaagattgcaccactgcactccagcctgggtgacagagtgggaccccgactccaaacaaacaaacaaacaaaaacactgatcttacatcgctcctcagaggaaatgcagagatgttcttgcattccattgggtaaaattgtaattgttactggaatacattaggatctgtatttcagtagccagcactgaatggttcaacagatttcagttatccatgcaaacatatttaagtatctttaggtattggaaaaatgtttgtgttcataaggaaattagtgaacaaacaacaaattgtaacataaataacgtgccagtaaaccgtgaaagaaatagaaaccatgaatgtgtcaatcacagttactagccacataggtgtgttactgttgtttgagttcccttctgttagtaccttgccataaataatcatttaggagtttcctggttactttgtgttttgtaattctggattttcatgccaatgaagttgtaaatgaaaaactaacctcagaaaaaaatatattgaattcattcaacccatgtactaagtgaaaaagataaggtaactgccctggaagactttgtaatttgtgtccaagacttataatcagccaatcacaacagcaactccaggtgccattaaaatgatatgtcttgatggagaaagctggagatctggggaaattagaagaaaaaaaactgcagagaggagataacatttgggctgtgtcataaagatttaatatatgcttgcaaaatagcaggataagtaggggcatatgtttaagagcagtggggaatagcaagaataaagaaaaggcaggaaagcaactgatgatacatcatggcatcatggggaatggggtaggaaatgagatgagaagaaggactagaactcgattggaaacgactgtatgccatggtaagatatttacccttatcacacattcagctgaggtatttaagtaggagaagaacatgaccaaattttaatttttgccaagtttttctagcagcaatgtggagagacaggaagagatttttagcaagggaaccatttaataaaattgatatagcagtccaagcaaaaaaaatggtgtgggccccgcactaatgcaggagcaatgggagaatggagaagaaccagcaggtttggagctgggcataatggtacacacctctagtcccaggaactcaggaggccaaggcaggaggattgtttgaggctgacctgggcagcatagtcagaccctgtctcaaaaaaaacaaaaatcaggtttggaataggtttctgaagtacaatggacatgacttagtgaccaattgttgcaggtggggaaggggagaagactgtgaaggatgtcagaagcttttagttttaaaaactgtctagatagtgataccattcatagagatcaggactaatacgttcacagtacatgataaatttaggttgattacatttgatatattttcaagacatctatgagtatatatctaagagataaaccacaagatgtacctggaattcgggaagaaagtaaacaagtaaacatttagaattgattagctcacagatagttgaagctatggaagcagaatgagatcttccaggaagaatgcagagaataaaataaaaaggacaagtgagaaaggaaggaaaactaaatgtagaaagtagtgtcccaatctcatgtactttggaaagcactgactggttttagaaaacctgagttttccatctggtcattgtctagatccctagccatgctacctcagactaattacttaactgctcatggcttcatcagtgtacatgtgcatgaaacgaagaagccggactagatccctttggactgttaaattatttggccttggtatttatgactattatgaatagttattcatattcttgaggtaatagactttgtatttctcaagtgttaaattgtcagattttattatattggctttaattctggctttaataaaataatactgttggccgggcatggtggctcatgcctgtaatcccagcactctggggagaccaaggcaggtggattgcttgagcccaggagttcgagaccagcctgggcaacatggagaaaccctgtctctactaaaaatagaaaaatcagctgggtgtggtagtgtgtgcctgtagtcccagctactggggaggctgatgtgggaggatcacctgagcccaggatgtggaggttgcagtgagctgaaatcatatcactgcactccagcctgggccacagagcgagaccctatcaaaagaaaaaaatagtgttaatacatgattacatgattagagaaactaaaagccaaatgggagataatgctacttgctatttttgaagcatctcccagtgtatctggtttttagtattttcaggcatgcatatctttttttcaaagcttaaaaaattaaaatcaaactctgctttcttcctaagcttggaaattactcatgtattaatgagtagttcttggcaccagcagcgtttcttaaactgaaaagactggtcagacatagttgacctttgctactgaataatgcctaccattgcatttattatcagttatcatatttgttgatttacctccagtgtagtttggtttacctccagtgtacagaatacaatctcagtttaatttgcaccagtaaggtgcaacctatcctgaaacagaaagctatgggaacaaaaccctttgagaagatggaaaataaaggaaagaaactgctccagggatgtattagagctttctttgagtcctcagtgaaagcttaaacactttatgtccaaacattttctttttagtgtattcccatttatagacactgtagttaatgaacttgcatattcttaacttttgtttataggaacaaggaaaagttttgatcacttgatatcagacacaaaggctcctaaaaggcaagaaatggaatcagggatcacaacaccccccaaaatgaggagagtagcagaaactgattatgaaatgggtgagaaacaaagtattgatctagatcattgaaaataaggtgggagagtacatgaaagtcatgtttattttccagccatttcttagaatctttagagtgaaatatagaaacgtttgccatttctcaaaagataaactctaccattcaagacagttatcttgaagcttgtgtaaaaattaatcatatatattatatacagcattgtaaataggtagccaaaacttttgtgtaggcgaatagtaattctctatgatgtttatgttagtattttaagtatctactaaagaaagctgttgaattttagaagtaacattgaaatagttaggtgaagtgattatccaggtgtttgatcacgttaattccctatcttgctgcagaaactcagaggatttcctcatcacaacagcacccacatttacgtaaagtttcagtgtctgaatcaaatgttctcttggatgaagaagtacttactgatccgaagatccaggcgctgcttcttactgttctagtaaggatttcccctttttgagtcccccaccctcaaatttttattccagtctacttttaggaggcccttaaatattaaaaacatgaataggatacagtcttctacttctcacccaaacagataacaattcagccacaaagtaaaaatgttgtgtgtttacttttttgcatcttggcaggctacactggtaaaatataccacagatgagtttgatcaacgaattctttatgaatacttagcagaggccagtgttgtgtttcccaaagtctttcctgttgtgtaagtatctccttttgattttaattcaccttcgtgcctgtctttaagttaaatgcttacccagtaatgtgcactggttgcaaagagggcaaaatgagatattgtgatagtgattttagctttgagacagtaggtttaatgagggttaagattagttttgacctactagatctattagaaagtttataaggaaagacttttaaaaaatctggttgatttatttaagtggtttattttgatgatcattgctcattttcctcacttagaagcaaactattagactgctatatctaaatcagcatatctgttttggtttactttttagtagagcttttgtatttatccacagctgagtgaaaacaaaattgaccttctgtttaggaggtgaattgtttactctctcttaaggactaaaaaatattaacctcaaagtgttcaaatttaaatagttcaaataaattcttttcctgatctaggccttctatatcatgtcattattttctttttttaatctcatgttagaattttagagagttagaactcagttatttttattaatggagtgtagccgggttagaaataatttttttcctaagtttcagttggatcatgtatttcactccctctaaactattttgctttccctatttgatctgactcagcattttaaaagcactgattaacattaaatttaatttttttctttttgttttgcacagatcctaaatttagttttaacttcctaagcgcatgtcagtatacaacagatggaaatagtactaaaacatgctaagtagcagacagagccaaccttgtcttaagcaaacatttaccgtatatggttacacatggttatatgacactaccagttgtttgttttcacaatttcttccctggtgactaaaaacaaaagacaaacaaaaacagacacacacacatgttcattgtagaaaatttggaaaatgaagaaatgccccagaaagtaaaaagcactcatctccctttaattttggcacattattctggggaatgtatattatgttttccactacatattttcatttaattttcctctaaaatgttcctctgttgactttttttttcttttaggcataatttgttggactctaagatcaacaccctgttatcattgtgccaagatccaaatttgttaaatccaatccatggaattgtgcagagtgtggtgtaccatgaagaatccccaccacaataccaaacatcttacctgcaaagtaaataaatgtatctggagaaggatggttgatgaacttgctaacatgcgcgctgttgtagaatgcactgactacagaattctttataagggatagacttgttcatacttttatttccatattccatttttttactctctcaactgtatgtccaatgtaactggttgacaactttttatgctgagtatattttaagtaggttttagttgctttgacactcattctaaaaacatgttttcaacatgtacatagggtttatatatcatcagctatatgacttatttaatttctgttacaattaaaagataccttgcttgttataagagtaaaatttgatttgttgcaggttttggttttaatggcttgtggcggtttgcaggaccgttttcaaaggtaagaaaatatatttttctctaacttttggcaaaatgaaggtttctgttcaaattagtatgcctgctttaagaacacacaatgtgctgaaaaccagaaaaataattcacaataaacacatatgttacttttataaaaagtttctcatcacaaggtttttttccaggaggcagcatggtgttggggtgtgtgtattcacttttacaaacaaagtcaacttatgatcaatttttcagaagagtatgataaacctctgtgatacttttctgccacagtcccttgtgtatttgataatcttaatgcacacagttagatatcttatgactagcaaggagcattaccatggttaaaatctatttcatgaaaacatttttatttccagcctattagattagattaatttctctctggatttgtcctcatttgctcttattcagtttttttgtttgtttgtttgttttgtgagacggagtctcactctgtctccaggctggagtgcagtggcgcaatcttggctcactgcaacctctgcctcccaggttcaagcgattctcctgcctcagtctcccgagtagctgagactacaggcatgcagcaccacgcccagctaatttttgtatttttagtagaaacagggtttcaccatgttggccaggatggtcttgatctcttgacctcgtgatctgcccacctcggcctcccaaagtgctgggattacaggcatgagccaccgcacctggcctcagtttgttttttgattggcattagtttatgtagtgctacataagatgtatatgatcattttctctgtatgtgggctctctccaaattgatcaaagttccttgaagacagggtttctgtttcttccttaaacagttcctggtgcagtgttttagatacagggggtgctaaatcaatatgaattgtataaaccttgttccagtttttaagaattgggtattttatttatttcctttcactattacttgaatatctgtcaacatgcaaaggttgtcacttaaaaaatgggcctgaagttacagaaataagtatatcatacagaagtttttgcatttggattgccagtaaccctctgagccctttacagtgtctagtgagtggaatctaaatggcagctggaatgatgatgctctgctcattttctctgttttggaaaattggctagacatcattcctggtgattgtattgtctcagtattacattcagtctgtcttgtgcatggctttcagaaaatgcaggttcatctggaagctttaagctgaatagaactccctgttgtaagtcctatggtagtctataaatattactccactccccttttttaatgataagtaatacaaaggaagaaaaatagtaaattaagtccaaacaaaattaatatttttggcttcagatggggatttacttaaaaaaaaggaactaaaataatttcctattttccattacagcaaacacaaattccagactatgctgagcttattgttaagtttcttgatgccttgattgacacgtacctgcctggaattgatgaagaaaccagtgaagaatccctcctgactcccacatctccttaccctcctgcactgcagagccagcttagtatcactgccaaccttaacctttctaattccatgacctcacttgcaacttcccagcattccccaggtcagtaaatgtgatctttatatgactttgagcaacaatataagacaccaacattaggaattcccttgtgatcagtttatagcaaattttgctcctttttcttatgagattcaccttacatttcttctttaccttgtaactgacttgacttttgttattctatgaagctttctactttcaaacaagttgtacataagacagtaaaatgttaaaatgtccacatgatattccaaggttgacaagtttgtagagtttgggcaggaagaggaacttaaaacacattattctgtaagtgaacagaactataatttatttactagatatactaacattgccctaagggcctctttctctgtctctgatacagcatactatatcaaaaaaaaaaaaaaaaaaaaaaaaaaagaagaagaagaagaaacacaaaatctattaggtacctcactttcctgctgccagcaataactcaaccatccatagaccatcctgaaaatctggaagtaaataaataatcaaacaaaaaattcatctcaagaaaataacatcttaaagcccataagcatatatataccaattcgtaatgcaacttagatttgaatacactgagaaatactaatagctaatagctccagtgggactgagataaacaaggtgggagaaatggcaaacctacagaactctggacttattcagtgtcatagtgaatggtttcatacaactctggttgaccctggaggtgctattcattatagaacttaaactattgtgtgtgttattatgacagtgagtaatgaaggaaagcttttgttatggttgtgttttctatttagaaagatattcttctaaaatggttaaaaataaaagaaactttagttgtttaacgttccattatctgaaaagttcacttatgaaacacatcattgtataaggaaaagttactatatatagttcttttaagtgttagcataaatttaaaaaaaatccaatgacataactattctgtgatattcaagatcaataaatagaattcccagtttatgatctcagttttgcatgaacatttcaacttatgtaattttgaaggttctgaagaatttggcaatacccaattcatattataaactattatgtaattaactatattctattaaattctgcttaacaacaaagctttggtcagcagaggaaacaaattttatttccacatttgtcagtcgccttacaagtaatccttttttcccccagaagtaagagaagtctaactttttttcccatgtaacaaggtttgtttgccctctgccactaactctctagtacagtgtttctccacgtgtgatcccagaccagcagcatcatttgggagcttgttagaaatgcagatgctgtagtttcacctcagatctgcacaaaaaactcccaagtagagcccagccagcagtcagtgtgttaataaataccccaggcgattcttacacacactagaattggagaagcactgccctggggtctgcttctggtcttgcccattatcagcatttcagctgtgaaggccagggcaaaacttaaaatttactttttttacagatactgcagccactgaattccttcctgcttccccgctgataaaccttttagcattttggagctagggaaccatacaggtaatttagttttaggctcacaatattgtgtacattggggagactgagttttagaagagctgggttaactgctttatacagttcttatctagaaccaaggccaggcccttttgtactacattcattgccttccatggctgttgtctgtttgattatctatctactttcccttctccttctttatttccttgtttttgtttgtttattgctaattcattacttctgtctgccttgccttaagcccaccagttcttttttttctgttggactattttctgggttactgaacagaagttgaaaagtttttaaaagtctgcttcatcttaaccaagcttttgccttttgggctactaaactggtgttaaacatgtcaaaaatggttagtttttttattgactttttttacccagtctaattgtagggaaatttctgcctatctttgcccactaatggagacaataaaataatctggatgagaataaagaaccattacaggtttctctgctatttgattagttgcatatgtccagtgttgattggctatttgccaaatcatttgctttggtgaaacagtcttactctacaaccttttacttaaaattgtttattaaaatcagaataggttttatggctttggttccagtttcaaactaatggtgtcacctccattagctctccaaagttggtgcctttattcaggctggaaatctctgactatacacagaagagatgaggaggtttaaaagtaatagagttaagtggtattgtggtgttcaactcttcctgtcactcaattgtgtgtcattggtttgacagtttattttactacatgttttcagagaaagggtttatcttttcaaaagtaaccttactctcccacaaaacccatttgtatctctaaattacaggctcatgttcacaaaaggatcccaatttatatgcccaatcactgagtttttgtcatttgctcttacagaataactcttaatggtaagagttgatcttttgtttataattaggtatattgcttcatatctttagctccatgtaatcttatatccttatctctctctttttttttttttttttttgagacagagtctcgctctgtcgccgaggctggagtcagtggtgcgatctcgactcactgcaacctctgcctcccaggttcatgccattcttctgcctcagcctcccgagtagctgggactacaggcgcccaccaccacacctggctaattttttgtatttttagtagagatggggttttatggtgttagccaggatgatctcgatctcctgacctcgtgatccacccacttcagcctcccaaagtgctgggattacaggcgtgagccactgcgcccagcattttttttttttttccccctttggagacagtgtctcgctcagtagcccaggctggagtgcagtggcgcagtcttggctcactgcaacctctgcctccttggttcaagctattcccctgcctcagcctccctagtagctggaattacaagtgcacaccaccacgcctggctaattattgtatttttagtagaaacccggtttccccatgttgaccaggctggtctcgaactcctgaccttaggtgatccacccatctcagcctcccaaagtgctgggattacaggcttgagccacggcgctcagccatctcatttctttatggcgttgagtttgcttatatcaaaaaaccaaaagaaagttgtccagattcctaactcagtctggcgtttcaactttgctgtttagctgtatagaaaccaaaacatttccttatctccattcccagcagccaagtctcaagcagtagtattgaaagaagttctctgtcattccccgatatggagcataagtttgatttaccatcaaattacccaacatcaacctatacttagtcaactgagatttaaacagataaaggttccattgccctatttcaaaaagcaaatgttgctgatctgcacgcattcaatcctttgctataaatgtttcatgtcaatgcaaaactcttcattctagatctttgatgtttagcaggatcagctactgagctgtattttcttttgtccaacattttctactagcaaatcaacaaaataagagattcatgaacctctcctcctccccctcctgccccagcattaggtcttacttaaattaaacatttgggcagtatttcgttagttaccagctttgaggagaagtggtagtcacttacataaagcaattgtctctgaaaatgcattcttcttgacaaattagcatagcctaattctccatcctaagggggactgttttacaagtctacatataaaagtacctaaatggttgtcttctgaatccctccctagtagaaattgaatttggcatcagtggagccagtgactgtacctgggattcagtgcatatagaattgcattgactgtgaccctttaggcaaatggatgtaagactttggctcttaggattttcccaaacaccaataagagcatcttgaagagaatccatttactttatgatatataaggatatttcaggtttgatattatgatccttattaggtccagtctagctgagctggacatgaattgaagaaccagaattagaactagaaaatgaaacccaggctgagtgcggtggctcacgcctgtaatcctaacacttttgggaggccgaggcaggtggattgcttgagaccagcctgggcaacatgacgaaatcccatctctacaaaaatagaaaaattagccaggcgtagtggcatgcatttgtagtcccagctacttgggaggctggggtgggagaatcacctgagccggagaggtcaaggctgtggtgagctgtgatcatgccactgcactccagtcagggattgagaacctatctcaaaaaaaaaaaaaaaaaaagaaggaaagaaagaaaatgaattaataggatccatttccaaagcattaaaatttaatatatactttatcagggtcttctgatattcttcagaggagaattgttgtaagttaattcaataaacatttgaatacctgttttgtaggtgtatgttaagtatgtattagaatccttgatcaccagagacttgacggtttttgccttgaaagttatttccttccgatccatgttgtttaacaaattctaagtgtgcactattttttttattttaaatacaagattaatactatagtgcactgtagaaaataccaaaattccagatatttatcctacatatatgtattgtttactatatgcaaggggctcttagaccccaggggagcagaggggctgccagggcatgatacctgccttcaatatatttcagatcagaacgggcagtagaatgtacatagataactattttgacctctattgtgatacctgtcatgttgtaccttgtactatatagtattctgatagttcaaagggacatttgtgtggaaggatcatgtaataattatggcaaaagttttataacacatttttcacctcaaaaatgtttttaaacaaaacaagtaaattcgtgatctatttaatttttttttttttttttttgagatggagtcttgctctgtcacccaggctggagtgcagtggcacgatctcagctcactgcaacctccgcctcccaggttcaagcaattctcctgcttcaccctgctgagtagctggcactacaggcacccactaccatgcctggctaatttttgtatttttagtggagacagggtttcaccatattggccatgctggtctcgaactcctgaccttgtgatcctcccacctccacctcccaaagtgctgggaattacaggcatgagccaccgcacctggcctaaaatttttttttactaggaaaaaggctttaacttttttttgtttgatcagctcattttactgttagtattggtgcgtgaattttttagaacaaagacatacttagttcatcgttactttagactcccttcttccatttttatttctggccttggtccaagcctaccagtcattctctcactttgcttctgtaatgtagaccttcttcctgagaagctggctagatcaggtagtgatcataacattcctaaaccaatagtgctgatagctctgtgtacggagggatatttcatctaaaccattgctctaaacttagacttggctctgagtcagtaatacttctgtttactaggtttgaaatatctccctcttagctgggcacagtggcacatgcttgtggtcccagctactagggaggctgaggtgggaggattgcttgagcccaagagttcaagtctggcctgggcaacatcatgagaccctcgtcttttaaaagaaggaaaagaaatatctcccttttagaagaaacctagaagtctctattttgaggccacttaagatctctgaaatgattttaatgttttagagaattgtttatggtattacctgacctttttttcttgatttgttttctttttctttgttattatcctatgtttaagggagaaaaataattttaaattgagcgatttcttggtataattcttgctaatttttaaatctaatttttagcttaattcttaatttaaactaaaattcttaattttaatataagtggtaaaaaaatacatctacaaagttgtaagttctctcatttatttaccaactgtaatatttaggaaattaatggtcagaattcaataattaaaaccagattccttctgaaaaccaaggaacattataattatctagtatctaattgtatttcacccttttttaaatcttatgaacatcacttacttgcttttttttcttccattctttgtaaagcttctctgccttgctctaaatcagcagttttcatgcagctgttccctcatcaaggtactctttattttcatcatctttgcacgaaaatactgcttaccccacactcatcctgggcacatagcatgagactttactcaccggtccctgtaagctcagtctgccttaggcactttaggaacttgtaaagccaccactttataaggtcttggtacttaacaggaattgcacggccagtgtgtggcctgtcttgtttaaggagctgctaatacccacccagaacaatgaagatgcaatcccatacctggactaacaaaggcaggttaataagaaactcaagagagagttaatagagaaagagcagaatacgtggtttgatgaagtttttttagcttagaaaataacttgttttccccaaatagaaagccaaccccagtgtttcctcagaaattaaagctggctgtctattcaatcacctgtggttaaaaaaaggaatatggccaggtgcgatggctcacgcctataatcacagcactttgggaggccaaggtgggcggatcacttgagtccaggagttgaaaaccagcctgggtaacgtggcaaaaccctctttctacaaaaaatacaaaaagctattcacaggactgaggtggggaggttgaggctttggtgagctgagatcgcaccaccgcactccagcctgagtgacagagcaatactctgtctcacaaaaaaattaaaaaaaaaaaatatatggtcattagttagctataaggactaagatgaaaaaatttgacacatttatgtctaatttataaaagatgccttttcttttattcacctgtaattaatatacaaaaagattacacctaaacagaaaaagaagtgctagcagttggtgaacgtcatttttaaaaattcttttttctttttgagacggagtctctctctgttgcccaggctggagtacagtggtgtgatctcagcttactgcaacctccgcctccccagttcaagcgattctcctgcctcagcctcctgagtagctggaattacaggcatgttccaccaagcctggctaattttttttgtattttcagtagagacgaggtttcaccattttggccaggctggtctcgaactcctgacctcaaagatctgcctgccttggcctcccaaaatgttaggattacaggcatgagccacaataccaagccaaaaattcttatagttacaattttttatatttagctcaaaataaaaatatttctaagtatatatttaatacgcctccatgaatgtatttactgtagcttaaaaataggctgtagctacctaagaagatttattctattttgtgcttatttatattagcttcactcattttacaaattctagcataaaattaaagtcctagtatttgttctaaaactcctttgtatcacctggtcttttacttcagatattaggagcatcttaatttgtggagtaattattttatctgtgtgcaaaaattcttcacatagattattttgtctaacaaccctttgaaatagacaagtctgctgttatccttaattgccagattaagaattacaactaaataagaatattgatccaaacaagtctcaaacctaggtcttctgacatgtttaagttctcctgtatgtaataagagttttctaataagtttgccatattgtatatgaaataaactaaatgcagagtaaggtaacctactagtgctcctgcacaggtggcaggagatttcagtttttattagtctgtcatttttgtagtataacttctcacaaattacctaacccatttttccttagcttttcaagagttaaaagcgattctgttgttttattatttcatgatactattataactgattatttcagtttgggaaaccaaaagtgttttttaaaaatgagtgactaaaaaattgtcaggctggagctacatcactagttgtaaaaatacacaaaccttgatacctgccttcaaggaactcatgttctagcagggaagatagacatctaacttaaataacaataatgtaatctaatccttttccccagctactcaaattcactgaattttggccaataacaccttctagttaggattttgtctttatctggaaccaccacaatttattgaaacatagtactgctgatatactgctgtacagaatgtccagctgtttctgctctgcatgtttgtaattggctgcatgtttgaccacagcatatctgtggggtcatttaagctggcaaatcaggaccacagaagttttagctttatttcctttgtgtggtagcctctgggtttctgtcagtcactttgtagttttgtctgtttgttgtccaccaaaggccagaaaggagagccaatgctttaggggcaaaagagataccagaatacaaaactttaaaggggttttgatgaaaagaagtgcagcaccaaggccttctcactaacttaaaatatggcatatagcaatacaggatgtgttctgtctgcattggagtggtctatcagataatctgagagtttttcctatgggatattgaggtgaaatccttcaccagttcctagagagatttctagatttaattttagaggataaaaagaaagaatgctgccaaaattcttagaagtgagaattatgctgagaaacttaaatgccagaactagatactatgatcattctgtttcatactaccttggctttttcaagatatattttggtgtaaacgtaatgcattttaattgtttttttttaatgactttccaagatttttgttagtttctcctttgatccttacagtaaaacatctttgctgtgaagttgaacttaggaatcacagtcacaccacatttacctatgtgtgatttatacagttgggtcactaagtaggaagaaaacatacattccaaaaacaagaatttagatgaaaaatgaatttgagaaaagaagtagaatatcaacttttgacatagtgttgaagcttttggttatgagggatggggctgacaagtcactcgtacttttacatttttaattaatgtgctcattaggaaaaaaattggaaaattcagaaaaataaaaggaaaaagttacccacaatcctatcattctaagatagataaccactgtttattaacattttggtgcatttccttccagtttcttttttttatatacttgaggtcatagtatgtgaacaactttatagcttgttttgtaccctcaacatttaacaggagataaataaggcctttaaaattatttgaggtttgacggttatttgcttcacaaaacagaaagtggaatgttcttagcacttttttgaagataccttcaccctagtgacttcatctacattactacaatttatgtaattgtaattctcaggaataacactgtgcccaaacagaagcattgccacccatgtcatgactgttttcccctcagagtaggccatggtctagtagtagcaagacacacaagaacgagccccagggtagcagattgctggcagagagtcacagggccttcctagtggtcatccatgcttcatgcccctcctgcatgcgggccagctccaagttgtttcaaacctttgtctttttaaggtcctagttttgcctgaatcttattttctattaaagaaacaactcagaattactggacttgaaacttgtaggccaaatgcaaatttgaggaaatggaaggtcaaatacgctgacaaattcataattttaagtggaggatgccaaagggaaaaaaaaaagttctatcttttcaactaaaaatattataccactctctggagatcagggattgcatgctttggggctctgaattacaggtatctagctatcacattttaaaatggaagtgttcagttcattcagtattaattgaaaataatttttcaatgtattgaaaaaataactagattttacaggaaaacaaaaatgaataataatgatctttacccttctcagtgcctttactcagtagaggaagatggatgtacaagttgtagaatcataggcaagttaatttaaaagcaaggaaggagaaagtagttctggcaagagacagaataatgcatcatgaaggaaaaggatatgagaaaaaaaaatatgggttgaattttatcttgtagagatacgcaagacaattaaaagagcctacacaaacatacatcccaaagaagctcaaggcacattccagagatcatgagcagctttctttcagttttgttatttcttttgtaaatagctctggagaggatgcaaataaatatacagaagagaatttaaatagaccagaattctgttacccagagaaaagttccatgaatgtttctagtcatctttctatgcatatgattagattagattagattagaacatgactagccttaaaaaatttaataagggttttaaaaaagatttgaatagaacagattttcagtggtggttcagctatgctcacctcctggagaaatgtcgctgatgtttttccttgcactcatatgcctgatgcagtgcacatgttcataaacagtcactgacaaatgcccatgttcctttgacagcagttcagattttcaagacagcaaatctctgttgagcacgtgtaaaccaggccacgtgcttacagatgcctgatactcttgagtcgaattcagagctgaatccaaatgaaagatgagtggctcctagagggaggtcatcccaagttcatttcctgttcatgagccaacaaataactaactgggtagatctatgtacattttctgtaacataatgaatacttcttgacttgaaatattactttttgtccaaaaatggaaatttttctattctaagatttaaaatttcaatatataaagaagaataaagtacaaattagctgaaatcttgccatacagaggtaaaatatattttttagtcctttggcttctgacagagataaaatattttggcagatgtttacccagccctacgccctctccccacagtgtgtgggtgtttttttcctactccaaaaattgtggtcatctttttgtatcagtaaatatcaatcagtaatgtacattttgatacaaattactaaaacgttctgcagctgtttgctttcccgccaaaatttatgccagcagtaagtataatcagtctaattttgggggtaaattttattgatgtttaacagaaaagttcacaaattgcaagttttcagcttagtgaacttttaaaatgtaaacacacttgaaaatccatcatctacatcaagaaacagaacattaccagcatcccaagaagccatcctcatgcccccttaagtcactacttccgcaagggtgaccacagtcctgttacccaatttgtaatctttcctaatgtgatagataaaaataaaaatcttattttagtttctggttacttttctgaagttactgcttagattatttataatattaattggggtggggtgcagtggctcatgcttgtaatcccagaactttgagaggccaagatggaaggattgcttgagaccaggagttcaagaccagccttggcaacatagtgagactctatctctagacagaattttaaaattagctgggcatggtggcatgcacctgtagtcctagctgtttgggaggctgaggcgagaggatagcttgagcctggaagttcaaggttatagtgagctatgatcacaccactgcactgcagcctgtgcaacagggcaagaccctgtctctaaataaataatcaatcattgttaggcccaggttttggaggtttaatctcctcctcaagagaaataaatggcatctgtttaaggttgcagaatgtgaaatgacttggcatagctgaaaagaagcaaagattctacagtatgacctttgtgatatattattttctcagtaaatagtttctttgggataggcactgtgattaaaaaaataaaagcatcttgagttttctttgaagtgacaaatttgctggaaagatcagtactttctgctgctggagagtatattctgtttataaacatgaatgaggatgtgaataaggctagaagatgacctctgctggaagtttctggtatgatttggaggaaggagcactagtcttccctggtggctgctagcctttcatttagttcaagcctgccagcctctagcttttccttgcaacttgtcttttcatttttcttgtgctattttctgctatgatagcaaactttgcataacaaaatgtgaagttttccatgtgacattaacttagtaaacattttagcaattgactattaaaatgaaatgtgcataaacaatttgccaggttgtatcttatcacaaatatagtcatgtgctgcataacaacattgcagtcaacaacagaacacatatagacagtggtcccgaaagattataatactgtatttttactgtaccttttctgtgttagatatacaaatagttagcattgtgttacaactacataaagtacacaatatggtaacctgctgtacaggtttgttgcctgggagaaacaggctataccatatagccttggtgtgtagtaggctatgctatctaagttcatgtaagtacactccacaatatttgcacagacaaaatcgcctaatgattgtttcctagaatgtgtccccgttgttaagcgacacatgactgcaatgaaattcagtcctggaaggaaaagaagaagtaactggctgttctctttttctccaggaatcgacaaggagaacgttgaactctcccctaccactggccactgtaacagtggacgaactcgccacggatccgcaagccaagtgcagaagcaaagaagcgctggcagtttcaaacgtaatagcattaagaagatcgtgtgaagcttgcttgctttcttttttaaaatcaacttaacatgggctcttcactagtgaccccttccctgtccttgccctttccccccatgttgtaatgctgcacttcctgttttataatgaacccatccggtttgccatgttgccagatgatcaactcttcgaagccttgcctaaatttaatgctgccttttctttaactttttttcttctacttttggcgtgtatctggtatatgtaagtgttcagaacaactgcaaagaaagtgggaggtcaggaaacttttaactgagaaatctcaattgtaagagaggatgaattcttgaatactgctactactggccagtgatgaaagccatttgcacagagctctgccttctgtggttttcccttcttcatcctacagagtaaagtgttagtcctatttatacatttttcaagatacaagtttatgagagaaatagtattataaccccagtatgtttaatcttttagctgtggactttttttttaaccgtacaaaactgaaagaaccatagaggtcaagcctcagtgacttgacaccataaagccacagacaaggtacttgggggggagggcagggaaatttcatattttatagtggattcttaagaaatactaacacttgagtattagcaataattacaggaaaataagtgcgaccacatatatcttaacattactgaattaaaactatggcttctaagtccttatccaaactcagtcatccaaactagtttatttttttctccagttgattatcttttaatttttaattttgctaaaggtggtttttttgtgttttgttttttgtaaaccaaaactatactaagtatagtaattatatatatatatatattttttcccctccccctcttctttcctaactaattctgagcagggtaatcagtgaacaaagtgttgaaaattgttcccagaaggtaattttcatagatgtttgcattagctccatagcaaaatggaatggtacgtgacatttagggtagctgatatttttattttgttaaataatttccaagaatagagtatggtgtatattataaatttctttgataagatgtattttgaatgtcttttaatcttcctcctcctctccaaaaaaatcagaaacctctttaagaaaacatgtaggttatatatgctagaattgcatttaatcactgtgaaaagactggtcagcctgcattagtatgacagtaggggggctgttagaattgctgctatactggtggtatggattatcatggcattggaattttcatagtaatgcagatccaatttctttgtggtacctgcagtttacaaaataatttgacttcagtgagcatattggtatctggatgttccaatttagaactaaaccatatttattacaaaaagatattaatccctctactcccaggttccctttatatgttaagatataatggctttgaggggggaaaaaataaacctaggggagaggggagtttcctgtagtgctgtttcattagaggatttcagtaaattaaattccacagctaattcaataaataatggtacatttaagtgttctgattttaataatatatttcacatttatccacacagtaacaatgtaatatgttaatgtaaataaaattggttttgatactcagaaataacaagaatttaattttttaaatttgtttacagtcctgggaaaagtaagaattatttgccaaaataagaggaaagaaaaccttagtattattaatgagtttaccatagaattgttggaaatactgaagacaggtgcaatttactaaacttttgtttttaaactattgtagaggctgcattagaagaaaatgtttataatgacagagcaactatgactatataaaaaagctgaaattagaactgtgtttagaaatagatcagtaacccagtgccaaggatgccaagctgccaccatggtcttggctctcccacaacccagtgtttctggggtaagtttcacagtttctaggccctggaatagcaggcagtgtaagcctttgataactttagttcgatgtttttcttgtttttgtttgttggtttggtgcatatgatagtgggtgttatgctattttgctcttcccatcaaaataaagaaacttccagaggtttactgttaaaaatactgatatttccataaacgggtttaccaagggtgtagtatttcataccgcctgaaatgatcagcattggcacaaatcaaaattcagccgcctttgaaatgcaaaaatacctttgactagtaagtacatcctaggagtttgaaaacttaactaaggtttaaaatttaccttgtttaaagaacttctgacttttgaggaaaatctagctttccaagtaactaaaatgtacatgagataaacctctcaccactatgtgtcccttgagaaatgcaacacttttttagtcttcatacttgtaatctataaaagaaattctgaagtttagaccaagttgcccatttctgcgtaattgacataagttctgttaaaaatattataagtaattcgtttcggtttgtagatgtttcccctgacttgttaaagaggaaaccaggaactcagtcatgtttttgtcctggataatctacctgttatgccagtactcccatccgaggggcatgcccttagttgcccagatggagatgcagttcagtagatttggggcaaagtggctacagctctgtcttccattcactcaacacctgttcatgactgagccaggtgcccaggacacatcctaaacagtcagcttctatcctgtgtcctagttggggagacagagtgccagccagcaaccctcccaggtttgtaggttttaggggttttcagttttgtttgggttttttgttttttgtttttgtttctacatccttccccgactcccaggcataatgaggcatgtcttactcaatgttatgcaatggatttaggcaaaaattcattcttagtgtcagccacacaattttttttaatgcagtatattcacctgtaaatagtttgtgtaaaatttgacaaaaaaagtatatttactatactgtaaatatatgtgatgatatattgtattattttgcttttttgtaaagcagttagttgctgcacatggataacaacaaaaatttgattattctcgtgttagtattgttaacttctttttgcgactgcgttacatcatttaaagaaaatgctgtgtattgtaaacttaaattgtatatgataacttactgtcctttccatccgggcctaaactttggcagttcctttgtctacaaccttgttaatactgtaaacagttgtacgccagcaggaaaaatactgcccaacagacaaaatcgatcattgtaggggaaaatcatagaaatccatttcagatctttattgttcctcaccccattttcctccttgtgtatgtacttcccccacccccctttttttaagtaaaatgtaaattcaatctgctctaagatatgaggagttatttaatttcttcagatgtatcgagctctgttttcttccccccgagtcctcccaatcttttgaaacattaaggccattttccttaaggatgtttttggctctcctactccccgtgagaaagatctttccatttccagaacttctccacactaaaagtgaaatatttttgtgaaatgcttttttagggcctgccaaactcaggtgagtctgttctctgggataagctggcttctcttaaaatgaagccagtcagaaatgtcagggcatcccaagattgaccagtcagagggcagttctctccaacttttcagctttcccgctatagaatcttctgtgacactacacgtgtatacaatgtaaaccacctcccctggctcagctgccccgtgttactattttacttacttgattatgtgggttgcctcccccaatcagtggagaaagaacacagcccagacccagtggacaggacagagctatcctcagaagggtaacagtgtctgatattgaacaaaggactaaaaaagaccaggtgatagatacctgcaggtctgaggcaagtacttgtctgtttatgggcaggcctggaaagcaggggtacctcacctggagagcttgctaatacactggtccccatcctaatcccccaaggtaaaggcaaactctccaaggatgggctgttgggagaaagagtgtgtgtttaaacttcttaagcgattttacggagcactcagtggtttaaagaccattggagtagagaactgaaaactcaaatactgcaaatagctgccttttccctgtaacctaaagcatcttagtccaaactaggggatgtttttaggatagtgaccctctagatcagagctctcccttcctggacaacaagctccctgaggacgtgggcgacttagtacatcttgtatgggcctctctgcctgttctttgctttgctttctgggacacccttaggctagtctagcaattctgaactgcctggcttgaagagttgattcccatgggatgttgaggaggggccagaggttctggaagaatagtaaaaaacctacaaccaagtggtagcatctcagtattcctcttccacaaagtagcccatccccccccatcaccaagggaagcccctagtggtggcaggcatcttgggaatttaccttcattactaattctcccttgtctaccagtagcacttcttaacctgctcactgcccatcagaacagcctctgacaaagctgcatccaaattctttaaagggcaattcattgccccaagtaatctgccaaacctgtcttcatttggaaatcagtcttcatattcaggtgagttccacttaagacccttttagctgccaatttaaaagaagcccttttgcaatgttgattatgtttctataaatattagaaccagccgggcgcggtggctcacgcgtgtaatcccaacactggaaggccaaggcaggcggatcacttgaagtcgggagtttgggaaacatggtgaaaccccatctctactaaaaatacaaaaattagccggccatggtggcttatgcctatagtcccagctaccaggaggctgaagcaagagaatcacttgaacccgggaggtggaggtttcagtgagctgagattgcacttctgcactacagcctgggaggtagagccagacattgtcttaaaaaaaaaaaaaaaaaaaaaaaaaatagaaccatactacagcagcatagtcactgttggtttgaatctctcacattttgttcttttagaagtgctgcctaatcataagtttcataaagtaatgtggagttataattttaatcagttggtttggcttttttaaaaaattgtcttctaaaaatcggtttatactgtgtgtgtacatacatactacatatgcatatgtggatgcgtatttcaggtttccaaaacagcttgatacattttacctacattgggccaaattattttgtctttttaaattttctcaaaaaggtcatattgcaaaattattctaggtcctttactatgtctttatgctgacagtcaagctaatagtgatcaagagcattatgcttctggggttacaaggttcagaacttgccccattggccacttcctctatataaaataagacagtcacattggaatcttaatagggccctttcctgctcagaagttcagaaagcattgcctaaattaatatttttaagggaagaaaatgttgacagatgcaaccttagctgattgttcaaaaaaagtttttcctttggttataattgtaaatacaaaagaagaaagcttggcctttgtcctctatgacctcatgacttagtggggaaaacagccacacaaacaatgaccacagtgtcccaaggtgtgggtggggtttttagagggtcatggagtgactggcatggttggcaactgaggaggtgggtcttaaagaatgaccaagaagtttgtccaggttgaaatgtgtccagtgagcagttgaaaatagggttttggagtatttaatggacagaaggtaatcaagtccgttaacagactggcccagagacggatcacgaggtcaggagatcgagaccatcctggctaacacggtgaaaccccgtctctactaaaaatacaaaaaattagccaggcattgtggtgggcgcctgtagtcccagctacacgggaggctgaggcaggagaatggcatgaacctgggaggcggagcttgcagtgagtgagatcgtgccactgcactccagcctgggtgacagagcgagactccatctcaaaaaaaaaaaaaaaaaagagagagaggagactggcccagagagggcaagtagcagataagtgtttaggcagaaagcagcacaccacaggagattggcttctcgtgttatttttctccattcttttgtcccacgttggggaatgcagcttaattttctacatttacaaagtatatgggccaggcgcagtggcttacgcctgtaatcccaacactttgggaggccgaggtgggcagattacctgaggtcaggagttggagaccagcctgaccaacatggagaaaccccatctctactgaaaatacaaaattagctggacatggtggcacatgcctgtaatcccagctactcgggaggctgaggcaggagaatcgcttgaaccaggaagcaatggttgcagtgagccgagatcgcgccattgcactccagcctgggcaacaagagcgaaactccgtctcaagaaaaaataaaaacaaaaaatacgtgaagatatgccttagccccagatcacaaaaatagcaacactttttctatcctggcaattataaatgttttgagtctggcccaaagttgaagtagaaagaaattgatggtaaagagatactttctttgcaatttggtaatttgtgaatggaaggcagaaaggaattaggtgatctgtgccttcattaaaaaagactccacaaataccacccttactcatatctaggattctacaggagacaaaaattcattatcaaaataccaagtctttttgagtgtgcagcagtcattcagcaaaacattttctgggtgccttgttgtcactcaatttgagcaccagcacctcttggaaatgctttctgatctcccattggctgagagcccttctcttgcttctgtgacagcttctctatacaacaactttgtaatcatcaactatcttcctatgtccctggttaggattatgagcctcccagtgtagggaacatgctttgttcaaaggtgctcaatagatagttgttgaataacactgaaggctttatgttataaagaactatataaatagaatgggaaaatccccatacacaatagcaaccccaatgcaaaatccctaacaaaatagaggtgacctgtgtaataaagacctattgaaaattctaatccagactttgagatttcacagatcagtaaaatttccaaaatacatttcatcaacttatgcatttagaaacaagaaaaaaatatatctaacatagtttttttgtaaaacgccatttcaactctgagtagtgggggagggaatcacaggataaagtacagttctttaaaagaaattagttttgctttataaaagtcactatgttgtcctcagttttctctcattgctgcttatttttctccacacagcactgctcagcacgcaggcatgtgaggaagctgggcttaaaggagactccagcaaatggagagacagaccacagtcctgggttggaaagctgaatatcgttgaatgccagatcttcccaaataaatgaactggcttaatacaattctgatcaagatgccaacaagaagagagtgtatccagacaaaatgatctttggaaaatattcttcaccttgtggaataaacaggaaagcatggctaacaacgggttgtcgaaaacttccttattaggtagtaaaacaaatttttaaatgcttaaatactaatggtaattagagtaaatataaagtggaacaggctagaaggtccagattatgctttgatttttttatttaaaaagacaagcatgagtaactcccaaagtgtattggcttcaaagccacaaaagcttatttctcacctctgctacatgtccatcacccgttatcaggaggctctgctcaccctgatgtcttgggactccagagtgagtgatcagccatctctgatcactcactcatttgatctacaaatggctagccatcatgccagagggaaggagctcaggctgtaatgtccagccgctgtgatgatggaaatgttctgctggaagctgaaacagaggggtcccattttcatttgtcacattagcaaagacgtacttaactaatattggtgccagtccagaatgtggtgcaatgagttcttcctgcacttggcctcatctttctgtattaccagttccatatctgcactgtccaggacagtggccactagccacatgtggccattgaacacttgaaatgtggttagtgagaatgggaaactaaacttttatattaaataaatgtaaatagttacatgtggctactggctgctagattggacagagcagcatctggaagctcttgcatcagcaattaaaggcttgaggacagatacacagtcacttttcacagtcattgccagaacttgacacacagcttcacaaagtcacaagggtcaaaaatcactatcttcctctgttcaaaagggaaagagctggaaacattggccaagaacattaatgactcctacaatagggaaggactttgtaagcttaaaagcagtgtaagtgcagtggctcacgcctgtaatcctagcacttcaggaggccgaggcgggtggattgcctgagctcaggagttcaagaccagcctgggcaacatgggcctctctaccaaaatacaatacgttctcgggcgtggcggcatgtgcctgtaatcccagctgctcaggaggctgagataggagaattgcttgaacccgggaggcggaggttgcagcgagctgagattgtgccattgcattccagcctgggtgacagagcaggactccgtctcaaaaaaaaaaaaaaaaagcagtgtaagcttaaaagcagaaatcctaagggtcccgcattgactgcctaacattaaaatgtccccatgtccaaaaaaatcacacacaaaattaaaaggccaaccaatagggaattataaagagttcataaaaactcatctaaagaaaaaacctaagcagaaagaaaaatgggcaaagaacatgaatggccaatccacagaaatattgtaccaactcctgtttatgatggaaaaggtcatcacactcattagtaaacaaaaagaaatacaaactgaaacaatgggatacctgatacatattttcacttgtcacattagcaaagacacttaactaatacttggtgcaggtcaagaatgtggtgcgatgagttcttcctgcagatggcctcatctctctgtattaccagccttaaaaatgtccatactggctgggcgtggtggcttatgcctgtaatcctagcacttcaggaggctgaggcaggtggatcagctgaggtcgtgagtttgagaccagcctgaccaacatggagaaacccccgtctctactaaaaatacaaaattagccgggcgtggtggtgcatgcctgttaatcccagctactcaggaggctgaggcagaagaatcacttgaacccgggaggcggaggctgtggtgagctgagattgcgccattgcactccagtctgggcaacaagagcgaaactccgtctcaaaaaaaaaaaaaaaaaaaaaagtccataccattcgccctagtaattatctaggaatctattctggagaaacaaatggtaaaagagtgaagactttcatcaaagtattataatatcagaaaacctgaagacaaccaaaatattggttaaattatctacattcatccagcactttctggaagctgaccacttccttatgcagcctttaaaaatggcctaataatatttaaattttgggagggaacttccaataaaatcaagagttttaaaaccacataagagggctaattcccaattatataaatacaaatatatgtgtatagtttttgcataggataaagaaaaggaaatgtattgaatgttaacaatatgtatggctcacttactcctttttgtgtctatcttctaagcattttacaatgattattgctttgaaaacaaaaagggttttaagagatgaggataatgcttacttttagttgtactaaaaaggatgtttatgatagcagagtttaggtattacattaactaccacctcttggatgtttttacctttatctttttccttttatcaaaaggtagctctttactaattcggattacagggagctgggtttgttttccttccttaggggagtatcagcataactagtttagagtggtgcaggtgaactgctgtcaactccgtaggccaaccctaaaccttcactgttattttataacttctactcaacagcttgcaacctttcaaggttaacaaggttgatggggaatggtccttgctctcaagaagctcgtaggcggccaggcactgtggcttatgcctgtaatcccagcattttgggaagctgaggcaggtggatcacctgaggtcaagagttcaagaccagcctggccaacatggtgaaaccccatctctactgcaaatacaaaaaattagtagccgggcgtggtggctcacgcctgtaatcccaacactttggtaggccgaggcgagtggatcacctgaggtcgggagttcgggaccagcctgaccaacacggagaaaccctgtctctactaaaagtacaaaattagccagggatggtggcatgtgcctgtaatcccagctatttgggaggctaaggcacaagaatcgctttgaacctgggagacagaggttgcagtgagctgagatcgcaccattgcactcccgcctgggcaacaagagcgaaactccatctaaaaaaaaaaaaaaaaaaaaaaaaaaaaagccaggcatggtgacaggcaccttgtaatcccagctactcgggaggctgaggcaggagaatcgcttgaacactgcagaggttgcagtgagctgaggtcacgccattgcactgcagcctaggcaacgagagtgagactccatctcaaaaaaaaaagaaatacatggtgaaggatgtgcacatttaactataattcagtcattttcctcacctcttttggcttccaggcacctgttcccgctcctcctatggctctgacagcacttccttcacctgcctcttaactctcggctcttgaccctgtgtctgttttcctaatcttggaatgatcccatcatccctgagaagacatctgggcgccctggccaggggagacagctgatgggcagagcatccctgtgtgtgcatcacgaacacactgtagagtctgcaaagttctgtgagggcagagcagtaagggcagctgactcagggaaggcttcttggagggggtggcatttgaaggatggcagtgggggtggtggagggaggacaatccaggcagagggaacagcatatgcaaggcaagccaggcatttcactgatcaattccatgttgagtcactgtcttggagtctatgccacacaatgcctgggatatagtaagtgctcaataaatgtaaactgagtatagtagatgatgttactgcccagccatgttttacagaatggagagcatcaggctgtaaagggccttcctgcttgccgctcaccctgaggattgagtttttcttttaggcagaagtgggcagtagagaaggctcaaagccagggaatgtgagtggatttgactcaccaaggacactgcttcctaagccaggagggaaatattggtgccctgcctggaagttagtttcaggggccatttctgcagctgacagaaggatctggagcccagttgggtagaataagttaggttttggcatttcttcttagaatcccggaaggaattttagcaatcagccggtcctgcttctaagggtcagagaagattctggatacccctcacatcaacagctcatgcagcagaggaaagatgaggtctcaaggtgcccccctgcaccccaagtgtgccctagtccagccagggtcctcagcactccacaggcagggctggctgtgtctccaagcaggggcctctctgcttttgctcacagaaacatattctgggatcagtgaagaaggaaaataagttcacggcaccttcttccccttcaaagtgataattattcatgggtttaaaaaaacccagcaggttgtgaacaggaagtaactgaatcctgccccatttccagacaacatggacaatgaagtcaaggctcacagatgaaaatacagaaatgttcccccttttagactggttctaaactgctccatactgacacacataatcaccacccaggtgccaggtactgtgccaagcgctgggcgaggcatgacgcaatcttttttaaattaaaagcctgaaggacctctacaaggtagaaaaactgaagcttagagaaattaacctgaccagagtcatggggctaaaagagcaacagatgttggtgcccagctcagctgttttgaattccaaagcctggctcttcataatctttgataacttccacatgatattcatcccatctgtattcatttctcatggctgctgtgctagctcccacaaacttggtggcttaaaacaccagaaatttattctgtaacagttctggaggccagaaggccaaaatccaggcatcagcagggctgtgggcccttcagaggctctgggagggattctgctccttgcctcttctgatggctgctgttgctccttggcttatggctgcaccactccaatctctgcctctgtggtcacattaccctctctttatgtgtcaaatctgcctctgatccatcctatagatatgtgtgattgcattaagggtccacctagctaacccagaataacccccctgtctccagatcctgttgttttttttgttgttagttttttttttgttttttttttttttggaggcagggtctcactcttgtcacccaggctggactgtagtggcatgatctgggctcacggcaacctccacctccttggctcaagccatcctcctgcctcagcctcctgagtagttgagactacagatacatgccacgatgcccaactaatttttgtattttttagtagagacaggatttcatcacattgcctaggctggtctcgaattactggactgaagcaatctgcctgcctcagcctcccaaagtgctaggattacaggcgtgagccaccacgcccagcctccagatccttaattacatctgcaaagaccctttttctaatgaggtaacatttacagcaggggtcccaacgcccagactgcagaccattaccagttcatggcctgttaggaaccacagcaggaggtgagcgccgggtgagtgggcattaccgcctgagctccaccttccgtcagatcagtggcattagattctcatagaagcgggaaccctattgtgaatggcgcaggagggggatctaggttgcgcaccccttatgagaatctgaagcctgatgatctaagttggaacagtttcatcccaagaccctcttcccccgacttgtatgaaaccagtccctggtgccaaaaaaggttggggaccactgatgtacagggattggaatatagatatcatttaagggggcatttttcagcctaccatgccatatttgtccattccttaatttattcctacacagaccctaactatgtgtgtatgggcattatttaggagctacagaaatcaggagagaaatagacacagtccctgctcccagggacctcatggtcactcctgtgacctttcatacagtttcccagataatccggtgatagacaataggagtaagatggtaaggatagtcacaaggacaatagctgtcactaaccagcagcactgttctgacacttacaatgtatgtattaacttactgactctcaccacagccttatccatacctgtaagtgggctgcagtctgtacttttcacttctctgcaggagcacatgggagaggtggtcaaggtgggcaaggagtggggtggtcatgaaaggcttccggtaggaagtgccacttccacaacacaaggacaggaattagagaaagtggaattgggtgggggtaggattgagacctcccacccactaagcaaagggaggcaggagggagcctggatgctcccagactagggttaaggagaggcaggagagtatgaagacactgcacaatgccagctcaggcaatggtggccattgagttttcagcaggggagggacctgatcaaacttgtttcttcctagagaaggggccggagtcccaactgtcccttccatgtatatttcccagtatatttccagcctgcccaggctgctgcagctgttggaaatcccctggagaatcagaggtcacctggaggaagcggaggacagaaaggaggctccgcgccttcccgccctatccatggggacctcttgctttcctggagcaacccccttcaccctgcagccggccctgacatgggtattctcttgctgcttctgctcggggctgcactctgagctcttggatcagggttttgggagccctagtggtcccaggtccacttccaaggacccaaggactccataaattgcaccatctctgagggacctttgggtaggcactcagccatttctgcaggccctcttgggctcctagagcctggcacctcagtgtagatcacactgggccatgactgcccccatcaagttcagcaagtggctgcacccctttcactgtctccctagcatacccaacacaacgtaggtgctcaacaaaaacgtgacaaccccagaaagaatgcctgtgacgtgctttgctggccccagcagcacagcggtgagcaagagacccagtgccactggtgggggaggcaggtgtccttcaaaccatcgcccaccagagacaaaactgcagagacctgggcaaggagagtccggtcagggaaagctctcctgggggatttttgaatttgtgatgatcctgtctttgacaagaactggctaatctggttgcgggattctgtcttggttcacttgggatttgttcatgctcaggtctgaggtccccgcctctgccagctgaagtgggtgagtcttccagctcccctgtccccagttagggggcattcaatgccaggctgagcgcggagagccatttctgcagcccccaccagggggcagccccagctcctggccatctcctttctgtgctgagccccttgggtgagagaaaatggcacgagctgaccttggacgaactaatatcggggtcccaggggcaggcagcagcccccagcttccactccctacctccttgccagggggctggctggatctccagcagccagtctctcccagccagctgcttgtccttattctccacttccacctccattttgcagggtaggtcgggggaaagcagcattgcttagattcgctctcatcttcagttgccctaaaaggaaggtactattatcctcacggtacaggcgaggaaaccggctaaaatatgctagtatcctgctgagcggcatccagctagcagagacgctcctactcagccgaatacccctactccactcccacggcctcccctttcccgctttctcacatttcggactcctcaatcctcagaaccacaggtctctcttcccaagaggtgttgcctttcgtggctctcagacgaactgaagggtcaaaggagagtagctaaaagccaggttcatcccaggagccggggctggaaagaagaggtccccgcccactgtcagaaggcaaatggcagtccctgcgcaggatatattcagggttgagcaggaagaccacagaggtacaaaccgaggcccagctaggggaggccatgcagttcaccccgtactccctgtctgcgccactacgttgctcccggctcctcacataatgggcgggcccatcccctctgggtggggcttcctctgggcccactcttgcctggagatcagggacttgaaggtaattaagacatatcttgccctggagggcttcccagcatggtaggggaaatgggcatcccactagagaattaagaattaactgggcacctggaagaagggcttagaactcagaatagaagataagatggcgtgccatcagagaagccttcccggaggaggaaacctctgtgctgagcatgacagcataggtgggagtagactcagccaaggcctttttttgggttggggccagtcgttgccacaaagacctgatgtgccgagcaagaaggtggagagaagagcccggccgggtcctgcagggccccgaggctgggctgggaagttagcacaagctggggtggaggctccgctgagcactaatgggaggaggccagggtcctgacctagagcctgcggccagcgggacagagattctgtcctggattctctgagcttggggcatgcgggctgccagggaggtgtgatggtgggaacccggcgaaagggaggaagcctcttccaggcgtggagcagccttgggccctgaacaggcaggcctctggaagcgcctcgcttttcctccctccggcctcatcctggttttctcctcatctccccgtcgcagggtcccgggtccaggctggggttcagttgcctgctcctcctctctgtgccctcccccgcccgatggccccacaagtgctgtcttgcaggagagcgccgggagaccgcagggcggaggtgaagaacggagtccagagccctccagagatggcagcgaatcccggccctgcctcttgccagctgtgtggcctagagtgagtccgacctctctgggcctcagcttcctccgggatgaatgcagtcacggaacgcgccaatgcaggaggcccccaggacatcctgagcgctcgggagacgccaggcgcggcagcgggcacggatagcggaaaggggcgcgaccccgcggaatcctccggcagggcagggcctttgggtggctccgggtgtccagaggaaggggtgggctcggggacgcggagggaaactggggacgcggagggaaactgaggtcgcggaggacgcggccgttggcagctcgctgcgcctgccggccccgcgtgggccgccccactcgggaggacgcgggctccttttgtctgcagcgtccccgccgccgccgcccccgccgcctccccctctccctcccattttcgccgcggcccccgcccctcccctccccgccccctattgcccctcctccttcccctccccactcttctccttccctcccctcccctcccttcccctccggagcggctggggctgcggcgccgctgctgacacggatcggccgcggccgccaccgggcggaggctgcgcggcgcagacccagacgggcggccccggagggcgcgcggcgatggcggcggcgggcaggcggcgggcgcggcgggcgaggggtccgggctgagctgcgggccggcccggatggcgggcggcgcgggctggtcgggcgcccccgcggctctgctgcgctccgtgcgccgcctgcgcgaggtgttcgaggtgtgcggccgcgaccccgacggcttcctgcgcgtggagcgcgtcgcggcgctcggactgcgcttcggccagggcgaggaggtaagctggcccgaccccagtcccggcccggggaccccagcccagccccgccgcccctcccccagctcccccgccgggtcacccgcgtggcccgaggcggtggcctccctcccaatcccctccctccgccggagcccaggacctcggccccccccgggtatccctggcccagccgggccctcgctttccgccccccggcgcccgtgccccgagcgtcacgcgtcacgcctagggtggcttctgcgcccaccttccttcctcggccatgcaggtccttctgagcggtctgcacatccacccttgtctgggggagagagctgccagaatccggccctaggctccccaccccacccggcgctgcggagaccaagatgcaagggtctgtgtacgtcctgctgggccgggccagggggtgaaagggaccggtaggggtgctctgcagccttggctcctcggctgcacacaccctgcccagacacggaaggaggtgtctgctggggccaccgtgtactcccgggccagtgtcgggtgacctctcattcaggctctgctgggcagccaggctggcagctggctgtgttggttgcagcaggccaggcaaagccaggctcggggagtggtggctgagcagagggctttcatgtggcggggccgcatctatttggggaaagcaggacttacgtagattgttaacagggctggaagcggagggtcggtgccgccagtagggtggacggagtcatatcactaaacgcacactacaccagtgtcctctggtgccaccggcatggggactggggactgtgtctcaaggggaggacaagacacccacctggctgaaatggtcaggggtttcccctggagccaaaagccctgagaagtgggtttccaaggccatctaaggcctcaggccctgcatggggggcctggggccatgggcctcaaatgggcactggctggcattgtgttcccagaacaggtcggaccaggcatttcagaacatgggagaagctgggtgatggccaggttgggcccgtgcctctgcgtcaccagagagtgggaggcgattgagaatcatctctccacccgcacctgggcatgggccgggacttgtgagtcgctgagagctgtgggcagaagagagtgaggcagcttcagggcttgagaactcaggtacccaccacaggaaagaccactgcagtgcctgtgagagcccagactgccctctgcggggctttgctgagggacactgcctgctgccaccatgacccttcttccccaaaggccagccaagcccttccgtttttccagtggctcccatctggggcaggctgagcagactcctggcatggggatagtcgcgctccttcctctcagaacacagactgcaggtcgggtaaagaagctaccagctctggctgaaacctggagtccccgaactcagagcctcagtagtgggaagggcctcccaacaacctctggcaggggccaccggcctcagccacgtgcccagcaagcctcacccacttctcccccagctggacagttcctgccattagaaccttctccctcatacactctagagacagacctgcttgtcacttagtcatcaccgttctgcacggggactcacataggtctctcttctttgggggagcctttaaatatttgaaaatagcactcctgccccttctctccttcccagctccatactcccattttcccttctccaggccaaataccccagttcctgaagccctaggccatttccatgtgacccagtagccagacctctggcttctggccttggagctgccatcgactaattctgtgattcagttttcctagcaataacatgaaagggctggacaagcagaccgccccccgccgcccccaccaggactatattagccccaagacctcacacatatgcacacagcttagggtggggctgcctctgaatggggcactgcactctgcttatattaagtttctggccaccgaaacctccagggatctgttttagaaacctctgccaagccagggattctccacccttcggggagggtcagtgatttttttcttttaaaagcatactctgagattactacagaagcggtggatatgcattgcagaaaactggaaatagggacaagcaaaataaaaagtattgtgtcctatctctcaggcagcgcctcaatgacacttctgtcagacctttccagagctgtttccatgcttatatgtcaattttctccagaaaatgagatcatactgtgcatactgttttgtaacctgattttttttgccggtaaatgatcatgacttttctgcttcaataaattttcatctggtttaatatgcagacctttttcagatttccctatttgaccccaaaatgtccatttttgctgtttcctctccaggactgtgcagtgtatgtggttgttgtcaccttttagtctctcttactgtacacaattcctttttcttttcttttcttttcttttttcttttaacaatcctggcttgtggaagcattcgggcctgttgtctgtcagtaatttctggaatctaagcctgtttcttggcccttattcccatttaatttcgtcttgttcatttcatcacattgtatctgtcaagaaagagaatctagcatcctacctctatcactctcagctgtgctgctgcctgcgggctggagaagcagtgcttggtgtgtctgaatccacaaggctggttaaacattgcagggcaggaccatggacagggccccgaggcacttgtaggggtggttttcggcttatgctgtattgaccgagacccgtggaaatatattttgcatctctactcactacccatcttatcccctgatgcattaaaaaatcggagtgttgttttccagcggtggggtggcggggggcggggggggggggctcccttacgaaatgcagtgtactctgactgtttctattttatttgttttaaaatcaggcagtgacattgatttcccagccacttgtgctctgggatggataatgatcattcattagatatgtagttcagtgaacttagagctgattgtccacagtttaccacctacccccagaataccagggataccaggatcaaatgctttgcaaaaaccaaaatatactaggtcataaagtatgaaataaatatccatgaggccataatgaaatatatatatgtataaattattgaacagatgataataaataaataggaaaatctctcgtatagaagaaatctgaataacgtatgttgataattgccccattgaggaagtgaagcataacgtcccaccgtgtaagcatgagatgtgcgtagtggcttccttataaagggtagagtttggaaagtggggggaacagcaactgtatagtggagaaacccaacaaacactgtctcagaaggtgatcaaggacaacatcgatagtgacagattgtgatgatggcatacacccttggtgtgatgtggtgagaatagaacttttcctctgtggtcttcctcccaaaccagtaatcccagtctagtcctgagaaaaatgccagacaaatcccatccgagaggcattctacaaaatgcctgattaggacctctcaaaattgtcaaggtcatccaaaacaaggaaattttgagacactgtcagagccaagtggagactaaggaggcagctgactaaatgcagtgtggtgtcctggatgggaccctagaatcaagaagaggacattaggtaaaaactaaggaagtcaggatcaagtatgaatgttacttaataatgttatttatggattaggttagtccctgatagttccctactttgttgacctaggtatcacagcagaaaagaggagacaatgggccgggcgtggtggctcatgccggtaatcctaacactttgggaggctgaggtgggaggatcactggagctcaggagttccacaccagcctgggtaacatggtgagaccccccatctctacaaaaaatacaaaaattagcccggtgtagtggcgtgcacctgtaatcccagctagttgggagactgaggcaggagaatcgcttcaacctgggaggcggaggttgcagtgagctgagattacatcgctgcactctagcctgggtgacagagtgagaccctgccacaaaaaaaaaaaaaagaaaagaaaagaaaagaaaagaaagaaatgcagatttttgagggatgggggcacaccactgccctgatcctgaaagtctacaatgccagggagcaggactctgataagtatgtaacatgatggctcaacatcctgaccctgtgttgccttctgatatattgcattgtctccctaacctctttaggcctctatttactcatccatcaaatggggctgatcagagtccccattctatagggttattgtggggtttgagtgagttaatacatacaaagggcttagtccagtatctgcacagagtaggcataatatcagaattgctggtgctctccttgtcattattattattttctaaacacttgcaagcatttttgagaggctgttctaggctggagatttgctaggaattgaggtcaagatctggcaccggcctctgtgtgctcaactcaccctccttaaccagctgtggtgttcctgcccctcttacgtcccctcggcagtcagaatggtagacattgaaagcagccagagatgtcctggaccacacttccctgtgacatggtcctcttccctttccagtttgaagaccgtccttcttgctagaaaaatagaaataagaatcaccaagtaggcctctcccatgcattaacacagcaccatctcctctggacagtgggcctgtcctgcctgcttggaaatgaaatgatggtccccactgggctccctgagtcctcaggtcccctctgagctaatgcctgctatgggggaattgctagtgccacttgggttaagcctgggtctttgaaatggcaaaggggttggggtgctaggatgggctgagaccggccaggagccagccctggggctgggatcgatgtcttttgagatacgtggcttccaggaacaggagcacctggaactaaagctcctctgctcaggagtagcaattggataacagggaagaaacaactgtatccccacagctgtggctggaggaaggggtgaaggggaaggtagggccagatcagtggttccctgtaggcagtgagacctaggcagccaagagtggatgtgtatgagagaacaggggatggggagcaggattggaggcaggaggcctcctcgggactgtggcacatggtaagagaggaagagcatcctaacttgggcagtggcggggggtgcagaattgacaggggcctggaaggccggcaaagtcccaacgagctactcccaaaaggtgatagttaaaggtgctcttttgagaccaggcaacctctatgtgccccaccctaatgaggctaccatgcagagtgacaaggctggcacatcagaaggaaggcccaggtgccctgagcctggcagaaaaggtgggagtgcctgggacctgaggtggaagcaggacaagagtgagcccagagagatgttctctttcctatgcttctgggaaactgtgctcctgaggttggaggtcatcatggaagtggggccagggctggggatcccttggggcctggggatgggcatgtggcaccacactctgcattgaggcgggaggacgagtcctagctggggcaccctctggcctcttgtgcccaccagtttggctgtgctgggaggaggccagatgcagaaagtctgctgggactcatccatcttatcagacacgcccctgcctttttttttttttttaattgaaacaggctctcgctttgtagctcaggctggagttcaggggtgcatcatggctcactgcagcctcgagctcttgggctcaaaccgtcctcctgccccagcctcccaagtagctggcactgcaagtatatgccaccatgctcagctaattttttgtcagacactttttttttttgagacggagtctcactctgtcacccaggctggagtgcagtggctcgttgcaacctccaactccggggttcaagcgattctctcacctcagcctcccgagtagctgggattacagccatgtgccaccacgcccagctaattttttgtatttttagtagagacagggttttgccatgttggccaggctggtcttttaactcctgacctctggtgatccactgcctgagcctcccaaggtgctgggattacaggcgtgagccaccacagctggcctgtcagacactcttgacgaagcctgaatccatttggcaaaaccttgctgagttccagcgtcattcccaagacactggagttctagagaaggaggaaatgccagcgttgagagaccgtgccatggggggtggggggtgtgatccctgcctccattggtgagacctgaatgggggacatatagacctgagtagggggaagaatcagcccttcccatcagcaagacgtgccctccgagggatatcagtgggtagagaaccttgaaccatccacaagcttcccttatgggcgtccagcccatgaagtgtgacgttcccccttgtacaggtgggtcacgaggctggacaggcagcgtggctttcagacctggccctggctctgaggcttaggagccttccctagcaccgggaagaaaaccaaagaggaaaagaagaagaaaggaccggacagagggaggagaggctgggccaggagattcctgtgtgctgcctgggctggtgggcggggagtagggagcccaggaacctgggaacgggggcgatggctacaaagccacccctttttccttcagcagggcctccactgcctgagaagttcggcactgggcaacactgccttggagggcagtgcattgctagggtgggcagcaggctcctggacaatggtgccccggcctgggcaaccttcggccggcaggaataggggtgttcacaggtccacatggaggaggggttctgcctcagccctggagtgtagggcggagggctccttcccttcctgttgcagcacccctttggcccactgagcagtcatccccaccccagccctgagcagtgccaccaggaacagtgcagaaggggaacctgacagctggctgagatagactcttagagctgagtcacaccaacctgggcgggatggaggggaaatgcccgctggcctggaaatggcatatggcttgcccaagtcactgctgtcctcctagccccaagttattgggtaaatgcgctgaaatttttatagagttgattttatggaagtatcccttacatttacccttaacacgggtccagatttaaaaattttttattctaggccaggtgtggtggctcaaccctgtcatcccagcactttgggaggccgaggcgggcagattgcttgaggtcaggagttcgagaccagcctggccaacatggtgaaaccctgtctctactaaaaatacaaaaattagccgggcgtggtggcatgcgcctgtagtcccagctacttgggaggctgagataggagaattgcttaaacccgggaggcggaggttgcagtgagctgagattgcaccactgcactccagcctggatgacagagcgagactcagtctcaaaaaataaaaataaatacataaatacaaataaaaaatttttattcctaggcccagcgcagtggctcaagcctgtaatcctagcactttgggaggctgaggcaggcggatcacctgaggtcaggagttcaagaccaccctggccaacatggtgaaacttgtctctattaaaaatacaagaattagccgggcgtgatgatgcacgcctgttatctcagctactcgggaggctgaggcaggagaatcgcttaaacccaggaggaggaggttgcagtgagccgagattgcgccactgcactccagcctaggcgacagagtgagattccatctcaaaaaaaaaaaaaagccattttattccattaacatcttgggtacctactgtgtgccaaccctgccctgggcactgggaaataggaaacaacagggacctgggctcgcattctgataggggtcgcagaaaagaggcaaaggaatagaaacaactgtcaggtgcgggtaagtggcagaaagaaacattagtgccgaaacaaaagccagtgtacttagaacaatgtcatagatggctattgaggtggagcccagaatgaaatgggggctgcaccttgcatatgtcttggaaacgtggtccaggcagaggcaggagcctgcccaggggcttagaggcacagtgagcccgaagacaagggtggggccagttcctgtggccttccctgcaggggctttggctttcttggaatgagatggaagcccccaaagggttctgagcggaggagatacaggatcagacttaggtttaatggggaccaccctggctgctgtgtggctcctcggagaggcagaaggggccggggagaggcagggagaccagcaccaaggctagttcttcacccaggtgatgggcgctgggggccaggagcagaggagaagccgtggagcagtggctggatcttgaaaatggagccgattggcagtgggagtgagcaagaggagactttggagacaagctgccgttgctgggtggggaggcagagaggaagagggctgggtgaggactcgggagctccacgttggcctgtgagacctgagtgcagctgtggagccagtggcgatggacaggtctggggaccacgcttcagcccccaccgcctggcacatcctgggctctttctccctttccttctaccctggccctggggtctcatctcattgcccacaacaaaggagtttacagaagctgacctaggtgtggtctggccccctttaaaagtgaggcttggccgggagcggtggctcatgcctgtaatcccagcactctgggaggccaaggcaggcagatcacgaggtcaggagacccagcccatcctggctaacacggtgaaaccccgtctctactaaagatacaaaaacaaaattagctgggcatggtggtgggcgactgtagtcccagttactcgggaggctgaggtgggagaatggcatgaacccgggaggtggagcttgcagtgagccaagatcacgccactgcactccagcctgggcgacacagcgagactctgtctaattaaaaaaaaaaaaaaatgccaggcttgccccagcatcttcagattcttggagactcccccaggggccatagcttagggtcaccaattccctgcaacctgtcacccctgaggtcactgctgaggacccattgtccatagcttctgtgcccttgagggcaggatgagcagagcagcccagaatccttataggtttctataacaacccatgacccaagacggggagcaggctccatacagctgtagcccagattccagctgtaaggacctctggcttccctggagaccaaggccttgagtccaacacacactgcagttgctgtggctcagggcttacaggcgcaaaacccggagaagattgccagcttcctccaaagtgtttgctgatgacacatgggcctgcagtgggcactgtccccaggaagatcccagtctaaggctagcacctggacaggatagacagaggattgatttgaaccaaaacaaaaaccagaaggggagtagaggtcattcaatgagactcccattcagtgcctgcatcactcagtagccaagagacagggacgcgctgcctcccaaggcaagcccattctcacctggcagggctctggctgagttcttgttcatataacgagctgaaatctatctcctagagttccatctgctcacacttcctccacccattcatccaaccatctgcctgccggttcacctaagcatccacttacccatccatctacccatccatcatcccttccatccatatatacccaaccatgtacctcctgatccatccgtccagtgaaccgcccatccaacagtccatccacccatccattcattagccacgcaccccttagtccacccatctgtttatccacccttctgcccacttccgtagcctccccatctgtccatgcatccatccatccatccatccatccatccatccatccatccacccaccatctaccacttcctgagtatcagtcatgcaaaagtcctaagcacagacccagggatggggactggtattttcagggagtgacaagtgtctccatgtggtgaaaggacagggagggcagggagactgagaactcaggctggaacagggaccagatggtgactttcgggagggctcaggagctgggagggtctgagtagctcagatgagttttggatgagcagcaacacctcagtgcagtgattcctgccctctatggaatcaactcttttttatgatttctcacttcccacacaggccattgggtctggcaagagctgggaccttgctgaaaaatgtgaaggctcagattattttatttatttttatttatttatttatttatttatttatttatttatttttgagacagagtcttgctttgtcgcccaggctggcgtgcagtggcgcaatcttgactcactgcaagctctgcctcccaggttcacgccattctcctgcctcagcctcccaagtagctgggactacaggcgcccaccatcactcctggctaattttttttttgtatttttagtagagacggggtttcaccgtgttagccaggatggtctcgatctcctgaccttgtgatccacccgccttggcctcccaaagtgctgggattacaggcgtgagccaccgcgcctggccagattatttttaaaggtgcttattatgataggtggacctcagtttccttatctgtaaaatagaggtcatacccctatttgtggcactgttgtgatggttggagattgaatatatagagatatatgagtatgactgagcatggtggctattgcatcatttcttcaccgccccgcccccccgcccagccatgacccacatgggtactgcgctgccctcagtcctaggactgcacctctgacccctttctctgcccagtacaccccaggcatggggctcccttgtgcaatgaccaaagtcttctgcagccactggtgattttccatggacagagaggatatggagacccaaggactccaggacccaccaaaacttgctggctgcctttgtatttctttctttctttcttttttttttttgagatggagtctcgctctgtcacccaggctggagtgcagtggcgcaatctcggctcactgcaacctctgcctcccaggttccagcaattctcctgcctcagcctcccaagtagctgggactacaggagtgcaccaccacacccagctaattttttgtatttttagtagaaacggggtttcaccatgttggccaggatgatctcgatctcctgaccttgtgatccacccatcttggcctcccaaagtcctggggttacaggcatgagccaccgcgcccggccctgcctttgtatttcttaatccctttcgtcatcacggcaaccaggagcctccatgaggtgaagtgacttgtccagggtcttgagtaactggtggagctgggattagaacccaggtctgtcaggttctaaagctgcctttttagcttcctgctgtgggggtctcatgttcttagaaggtcagaggagggagagagtgacctgatctgagttccagaaatctaacattggagaaatctgaaatttgagacttcctctggctggggactttgagcctggggtggtctcggttgggaaatgcgcagatcagaagtaggtctgggctctgcaggatgggcggccaggggccctctcatgggcactgcatcccagcactgggcagggagggaggctgccagcgaactgtgcccagaattatgcatctgcgccacttcctgttcaaatggtgattccatggccccaggaggtgcgcatttctctgactgctccgatttcctgccaggcactcataggtaatcctctgcaggcccaggctgtgtggggctgagtcttctttgtctccagttggccgccccgccagcccgtggaccacacactcctgttcctgcatcctcctcggcctgcactgcagatcctccccagtcagaggccctgcagccccagccggccttggccccatcctgctctccgccccgtccccacttccacttttctactgcacctcagatcaggccaggccatctctcaggttctctccctgccctggggaagtgactgggagctgggccctagtgtcagacacatctggtttgagacccagctctgcaacttacttgctgcgtgactctgagaagttacttaacctctttatgcctcagtctcctcatctgtatagtggggataatattagcaatgcatgttaaaccctcaaaacgacacgtgacatagtgtcacatatgtttgttaaaatgaccgttaccaccacctctaggttttctgagtcagctgtctgatccactcttttacagattttttgaggtcagattctgtgtcatgtttggggccagagggtatacagatgagtaagataggattccttccctgcggtgggggcgggggactgacatggaaaccagacctgcgggaagggtgcgggcttgtgcaggtgtggctgaggcatgaagataggagagtcactctgcctgggagatgagaaagcctttctggagtgggacttcagaaatggatggcggggctgagtttggaacagggtctgccagggtggagggaaggacaggtatgccaaaggtgagacctacctgtgcagaggcccacctgcaggggtggaggggctgaccaggcaggctggaggcaggaggtggcagggcttgattttatcccaaaggtttcgggataaaatgttgaagaggtttaagcagagggccacacagctctattgcctttagacaaacccacctagaagtagcgtgggttggggagaaggggctgaggtgggaggcttctgtcccagttcaggggcaaggagaggggaccctgaggatggagagaaggggagggtcagagggaggctcccaggcggtctggaggcgttcacatgggtcctccatgattcccacctccatgactgggtgctggagccctgagcccagcgcaggtggcactcataggcctgccaagctcacgcagcctcagggcctgcccttgctctcaggaatcatttgaagggcagctgatctttttttttttttgagacggagtctcgctctgtcgcccaggctggagtgcagtggcgtgatctcggctcactgcagcctccacctccctggttcaagcgattctcctgcctctgcctcccaagtagctgggactacaggcatttgcgctgccacacccagctaattttttgtatttttagtagagacggggtttcactgtgttggcaaggctggtctggaactcctgacctcaggcgatccgccctcctaggcctcccaaagtgctaccgcacccagcctgctctttattttaaaagcaaaaaaattatcaaatattgttcttgatatagaaatttaaattactttatacttagtttttcttagttttctttatacttagttttacttttatagtaggaaaaagaaagctaactagcactgaattgaatttctgtaccttaaaacccacatctggttatgattgcctggtgtgagctatcgtgaccctttttcacctcgaggtgtttactgtgcctgaatctgttctagagatggtggtgtctcctccctctcccacccctgcctcatcccaggcaccgactggccctcacaccagtcactattagtgtctgcactaatagtgcagacactctgctctgcccagcccagctcactgagcccagcccacctggcagggcacctgggccagctggtcaacccctgggctcagctcctgctctggtgcaagcagggtggggcccagggatactttgctccccagatgatgccctccagagggcggaaggggggttgtctggagccaggctcactgcagaaagcctggaggaggagtcctgggtaccctgagctgagctgcacctccctcagtaccactgactgtcccttgggctctgctcccagcgcaggcgctcagctgccagccagaggagtggcctctggtgtgggcatctcacaacccctgacccccaggaggcacgtcctagacactgtgtgggtggaatccagggcctgtctgctcatttgtctggccagaggcactggctttgggcttctggtcaccttttctaaaaatggtcgtgtctcctccttctgtctcccctgcctcaaagcaagccttgctccaggcacgagggtgctgtttctgcacgaccccatcagcactattattttaatgtatttgtttctgccagtttgataggtgtgtaatggtatttcacatcttgtttacacttgcatttttaattgctcatgagactttgcattttttccatgttgctatttactcttggtatttctttctgcataaactgtcctatcgatcttttttcagcatttatcaaggggaatttttgttttgccctttattttaaagtcagttctatatatttcagcactgtttgtcatgccattttttcttgctctgttgctttcctctttctctctgttaatcatatcttattgctcaaaagttttcctgtgtgtgaatatgttttctttcaattatatcacatctgctttgtttctgattatatctatcacttctttagtagttagacacttattttccatctctaacaagaataaataagccattttgtttataacccccagttaactcaccaactgtttagtgttttgacacatttgtttttttgtttcacttgatttttttttttttttttttttttttttttgagacaaggcttcgctcagtcacccagactggagtacagtggtgtgatcttggctcactgcagcctcaacttcctgggctcaagcgatcctcagcctcttgaatagctgggactaacaggtgtgtgccaccacgtcctgctaatttatttttattttttgtagaaatgggggtctcactatgttactcaagcttgtcttgaactcctgggatcaagcaatcctcctgcctcagcctcccaaagtgctgggattacaggcatgagccatcgtggctggctttcaccctacctcttatctgtctgtcttatctatccatctatcatctaactccatttctgttgttttgttttgcttgaaccattttcagtagatgaaagacatcttgacctttctcccataaatacttgacagtttcctgcccaaatgcagtgccatgatcacccagggatttcacattaattcagcgatgtcatctaagattcagctcataatcagatttccctagttgtcataacattgatgtttctgaggagtccaggccagttgtcctatagactgtcccatcacctggatgtgtctgtttcctcgaggttagatacacagtaagcgtttttggcagggacaggtggtggtgtgtcctcagagcatctcatgaggggccacatgatgttcatttgttctattttggggatgctgagttcaatcacttgattaaggtggtgtctacctcatctattcaacataatggtacttttccccttataattaataggtaatctgtgggaccataccttgggacagtgtaaacatttggtttacataatagttttagcatccactgatgccccttgcctgagtaaattacactggtggttgccaaatggtgatttttttctaattctctcattctttccacagatagagcattgttctgttaaaaaaaaaaattctttccttccaccccccttttctgagtatcactatgaacttgtggctccttacctccccagcctgtcataccttgttaccttcattctttttaatgctcaacagttttttgttttgtttttaatgcaacattataacattttgagcattatgacttggaataatgtatttttaattgaaacaagccaatcattattaccttttaaaaatccttctgatagtcttcattatttatggattttgaagaatgtaacacatttttcagggtctgtaacgggtattgcattcagtctattagattagagagtgctgccatctttacatactatatttagtcctcccaataggagcaaaatattaacattaaaaataggtgttttacaattggactaaataaatgtttaatatttaatgtgttttattactgctgagaattaagtactttttttccattgatttttttcctagctgcatgtcactagcatataggaatataattgattttttgtaaatgttttctctaatctcaccactggtatgaattcatttatcatttctagtagttttctggttgatgactttgcatttcctaggtaagccatgccatccagttcaaaagtcattgttttgtgtcttcttttgagttcaattactttttcttctgagatgggagccgccagcatttctagagctaagcggggtgggcacaggagacatcgccccaactgacatgtgctggaacattggccacaggcccagctgtgagtcaaggagaacagctggggcaggggcagtggtcttaacagacagggtcccaaaggaagtggtgaatcctgaagaggtcgaggctggtgttggcacaagaggtggcctaatagagagggaagggggccagcaagaggccatcaggcctcctgctatggttcaggggaggactccagcctcatggcagaaaaaccaagtcccaggcagcagagcagggatgatggaccagatgaaacatgcacacagacggccgcagagttgatccgggcagccagatgcagctagctgggctgaggctgttccctggcccgtgtgtggtcttggatggtggtggagccagtagggataagggttggtaagggatggtggaggcaggaccccatcatcctttccttataattttttacagtggagagacagtagcttcctaccattaagtaccttgtcagtacttaggtttaggtcaatattcttttgcatattaataaagaccaccccctctccgctccgttctccttttgttagagtcttattcaagaccagatggtaaattgtatcaaatgtcttcccagcatctattaaatgtttcaacgatgcttgctattttcccagttgatgtaaagaattatgcttggaatggatgagtctccacttggccaggcctggtcaggtgcccatcctcagcggcagtccacccaaatcacagagaatggggaggagcagctccccagaggaaaatcagggtgcacttaccaggtgaggggcattgcaacgttgggtagaaagaaactccagatgtgtaggaaaacttagccttttagcccaagctctcttggttcccaccctgcactcaaggagcagggaggagcatttatttctgtgattctcctggcatgaggacagatgctgggtttctgcagccctctgcctccaacacagggtgttgtactggtacacagtactgggtttatagtgtgtaacaggggcacagtgttacttaaccgactgggtgagtaaacaaatagagtgcaaggggaccagcccggaacccaggagccccagctcctcctgagccctgcccccaaaatcttgtgatttggaagcaagttcctctctgcttcttgaggctgctagatggtttgggaggcaggagggctttgtgatcaaggactcagtgtctgaacgggtcagaggtcaactcccagatttccagcttgccggctctatgacctgggatgggcctctgtacttcctggtgcctcacctgcgaaattgggatgcgatactgttcccctgagagggttctcatgatgctaatgaaagaaggagggtgaagcacttagcacagcccttgtgcatcctaagccctttaccgagaggagttattagggtgcactctgtgtctttggggatatttagaagaggaagttctgcgctggttatagattatttggggctcttgtggggatagggataagtatccaagtccataagtcactgggattgtgcgcttgctgctgccaccacgtggtcccaggatgatgaggatgatgatgatgatgaaggagaaacatacctgcacctgcggctgcagatacaggggtaaattgaaaaggtggtattgcatagtagaaaatagtgcaagttgggctgggtgtggtggctcacgtctgtaatcccagcactttgggaggctgaggtgggcggatcacttgaggctaggagttggagaccatcctggccaacatggtgaaaccctgtctctactaaaaatacagaaattggccaggcatggtggtgcgcacctgtagtcccagcactgcaccgagggggctgaagggggcgggggcatggtgtcacacccttggaggggctgggactgctgtgggctgagtctgcctgggaaggggtgatggcacagcccttctgtttccactgttgctgctgggaatattcccactgccaccacctaaccacctttctgccagcctcagagggcatgtgccagctccaagaccagggccctggttgaagaccagctcctgccactccctgctgggtgaggtccaccagccgcccaatctggattcccctctcagggtctcatcatcagaatctccaggggaggccctggaaaatgcagcttccagggtcccaccctggtgaacaggctctgcagatctgtgttgagatgacaggatgagaatccctcccatctttccaccctggatggcacacggtttaatggaggatgcgtaggccctggatcagaatgccaggctcaaacctcactttccaggccgggcgcggtggctcacgcctgtaatcccagcgctttgggaggccgaggcgggtggattccaaggtcaacagatcgagaccatcctggctaacatggtgaaaccccgtctctactaaaaatacaaaaaaattagccaggcgtgatggcgggcgcctgtagtcccagctactctggaggctgaggcaggagaatagcgtgaacctgggaggcagaggttgcagtgagccaagatcgcaccacttcactccagcctgggcgacagagtgcgattccatctcaaaaacaaacaaacaaacaaacaaacaaaacaacctcgctttcctctcttctagcccagagatcccagctaagtccctgactctctggagctttggttttctggtttattaagtgaggccagtaacttccctccaagggctcgcatgaggataaaccaggggaagggtgtgtaggtgccacacgcctgagtcctttctgatacccaggactctgttacactggtcctccaccccaggcctctgagctactttcttttgggaaagaggtttaaattataaataagggcctcaatcatggatgaggcctcttgcctcctgccgtgcttgctggaaaagaactttgcctctgcaaagagcgtctacaaaatgagtagactcaagacctcccctgtggcccttggccctgccatacgggccctgaggaatttgctgagctgcctgggggtgcctcccatgaggacagctactcagactgcagggcgtccttccgaggagaaggtgcagttgcagcagagaggaagcgagggctagaaagcctgagacatagacagcccctctggccatcgtccttgcctcagtcggggctctgggagggccgcagccaggctgggtaggaccgagcatctcatgaggggccgtgtgaggttcacttgttctgtttggggatgctgagttcaatcacctggggagcagcttggtcctgggaggacccaccagaatttctcctccccaagtgagtgcatcagtgctggcagctgaacccacgagctgcaggcaggggtgtggagcaagtgaacctagacagttcatcctctaggggtgactgcgcacaccaccaccctcctctcacacagatgccggttttgccatggaaatggcccatttaatgtcctgtgcaagggagaaaagctctagatccccagagcaggggtcccacccgtgtccagcaaacagagggaggaaagggtattctgatccagcagttggtcaagcaatgtggaaatggagcccgctcccccttcactttagtccaggaaagcctccgggtaaaaatgctgactccagcctaacctgtctcaaacttacggatttcagaaacctttctacatgtaacacattgacactctctaagaaatgccatcctggtgatcttgggtgaaggactcaacctctctgggtcccacttgcttcatcagtgaaactggaaccttaatccccatcctgccctgtcccatcacagggaccacggataggaaggggcggggccaccttaatctctgctgcccacagagcctgggagctcctcttgtccccagcccctggctagacctggcccaggaaatgtacgtgaacaccagtgagtcccagggagcaggcagacaccaggcgcagataggtttcaggtcctctgccagggctacaggctgcacctcccctgggatccaagtggggtttccgtggtggagagattgaccagtgggcagtgaggtgaggagcagtacctgccccatttcacaggcaaaaaaactgaggctcagagaggtcggggtctgccagggcctcatggtacgtttgaaattccattatgggattcccagaacaagtcgcccttctcacttgccatcttgtgttgtactgacagcaacagtggaatttctgcctggagccactgtattttgctttgtttctgtagctaaacctcaatttactgaaaggccatgaggtgtcctggttaactcattttctggggaatggagggaggactggcgggagcttttcagtttgagtctagttgaagtgtcagagctggggagctcggcatgtttcggatggggcgggatagatgggttagaggaggcagggtccagggaccacagctcagagtggcccaactcctgcaggccagcacccccctttgatgagcagacattcccatgtaaccttaaataatgggtctaaagccaaccaaagcccacagcgagcagcgcctttcaaactatgctgagagccagagatgtcaacagagggcctcacacggagggcacggagggagctgtccttccataggccccccgagaagagagtgtcttccctcttcccccgcccccatatttagcctccccctgccctccagccactgagaacagctggtggttcctcagacccttcgagcacctctacggcctggccttggctaccctctccctcctccctcccttttgctcacaccaacgccccgcttcttgaattcccattccccacacctgctgtgtcagttcttccacctgcagtccagcataaccccctcctcctccaaggcccttccacatctcccaagccctctgggctgtctgtctcctctgggccccaaaactgcaaggatttggggtaacaccttcgagggggttacattgtgatggattctgtcttatcttcccctacagtgctatcagcagtttttcaaaagagtcataagagtttcattgagtttttttccccgaagtttaaaaatgatccagttcatattttaaattcagccagttaaaaattgctggaagaagaggtgcaacgactggctgtcccagctcatgaggttcacgggtgtccgcagcttcctgaccagcgtccaggcatgctctgcctatgaaagcctcatttatcccgagcctgctctgtgtcagctgccaggctgtcttgatatgccatcccctctcagtcctaacacatgatgaggcaatgatgttgctcagggaggttgagtcatccaccactggtcacacagctgggaaatggaggaggtgggattccagctcagcaatgtctgcctccagaggctgggagccacgctaccctgcctctgggcgtgtggcagtattaacagtcacctacacacttttatgctattcccgaggctatttttatttcactcaaaaataactccaggacatctgttccttccctgggagcttcctgggagcctctctgtctccccacaggccagtcagtctggctgaagagctgtggaaacatttgcaaaaggaacggacagatgggcggatgcctgcagaggccagtccacttcagagaccacccaggcttctgtcactttcgctcctattcagaccccaaacaaagcccttgtgggtggccggagggattctgtcagcccagactcaggctgtgaatgaggggccacctgatgacactcagatggatggaggtgttggcggtcccataaaggaagatgtctccagctgtggcggctgggacagcgcttcccaggaggcggtggcctgggtaccatgtcactgggccatggtgctggccagccctctggatgtctagccaccctggccagaggcactccaaagccgcacaggccctctccacctcccctcccatcaccaccttttatcccagtgggtccctgaggcggggtccttcattgggcaggggccctccagctgtgagaaccaggaagcaatgcaaaataacttacatgctgaggcaagtgtattcttccttataacacaagggtccaaggtagggcagctccagggctggttcctcaggggctcagaggcaccagctaggacccaatccccttccattgagcttcccagcgttgacccaagagggcatcccttctccagcaggggaagcagggaggggacagcttcctgttcatgggccccaccctccagagacagcctctcccagagccccctgcagatgtcttctcatggcttattggccagagatgtagaacatgcctttgcctgaaccaatcactggcaagggggaagagccccccggaactggcttggtccagtcagaactcatgctccaggttgagtggccccaggcacctggtcagacaggaggtgggcacctcaggcccagggggcgctctacgtggacaaagaggaggggaggggcaggatagtggtgactgacgaatctgcctccgttcttgtcattatttcttgactttatagaagaggggaagtaaaaggctcggaagagaggttgagtaattccccagggccacacccactccaaggtccccaagccatttacttgttccgtggtgaagctccagtaaatggaggcatttttctcccagtcctctgaccccgtctgcttctccactctggttttcttctcttcctccccccaatccccatgcccaccccaaacatgcctgaaagcattacgatcatagagacttcagagctggaagagacattcaatattaatgttatccagtgctgtcattgtccagatggggaaactgaggccgagagaggggaaggagctcagcgagaccactcagtaaagcagtctgtggtggagctgggactggatggagggcccaggaagcacagcatccctgagattctcagagggtctcagggaccaccctactttctcacctcagcccccctgcggacggtctccgcagcctcccagctggctggtggcccctctgcctgtcccttcccgggggaaggctcaccctcaggccccctttatgcatctttgcacctggcacatccatggcactctgcagcctctgatgtccttgactcatagtctgatctgatcgtcacagcggtcctgtgagctggtcggaagtgcattatagatacagaaactgaggcccagagaggcaacagggcttgcccgaggtcacgcagtggtaccttatcgaagcccaggcagagcccgctctctcggcatgcgacctgtgcagtcactcagggattagtgctctggggttgccttcttgaaattcgtggtaatgttcccctttgccctgggcgccactaattgcggagctggtcctgggcccggggctcctgactcctccaggatgctttccacaaccacataccccctctaccagtggcctacccagggtaagtctgactgattccgtgggacagcccttcacatggaggggagcgggcttagggagtgggagcaagacagtgggatgttttggcctgggctcagggtgcaggaactggaaggacccactttggaaatgcctccctcatcccttgtctcaggccggtgttgctgaagttcttgcctggctcccttcccatcctggcctcagaattaatggagagggccagtggcggcctgtgccctttgtcccaccggccggcctgggggtggcggctccagaatacagggtcctattgtgtgccctgatgtcaggcagctggactgctgggagtgaggataaacaagcagctggagcatctcgcctgaagccccaggagagggccagagcccctgcagcagcaggagaaggggccagtctgaagagggacagagctaggggcagttggattccaaccctgcctgctgtgcggtgaggccagcacagcaacagggtccactgctgtaagaggggaatgactggcggtttggctacttcacagggctgctgggagtgatgcacttgagtgcttcgaaggctgcctgacaccagccagctctgccgctgtcagcacttgcccctgtgcttcctatcgcccatattcaggataaagcacatacaggccctttgcctggctcgtaagcccttctctttcaggcctgttccctctctctttggccccatctcttgatgacgccccctccccatattccttccatccaccccagaccccctgcgtttgccagcattgccccctctccctctcctgttccctcttgctgcccttcacgtccttccccactgtccccctcacctggccagctcctagcaggaaaccctgcaactggtcctgggatttacgatgcctccggtaccccagtgtcctcacaggtgtctcctgactgtaaggcctccagagtggccacccctgagcaaggatctggccccagcacctgcctcacctcctccagagggtcccttccccagaagcactgccagggaaatctaggctccacgtgggttcaaaaggcacttcccggcctgctgcagggagtctccaggtgcccagacctgccactgtctttgtaggcccctctcaccccacaggcactgtcctttcccctcttttcccatctgtcttctattgtggctgctaaaacagcataaaaatgctggggagtttcaacttcaccctactccaagccaagccctgaaaccccttttgtggatatagacgatgtcaggtgcccagccaagcccaggttagtgcctggggtagcaggaattgccactccgatgcccatgggggccaggaaggaatgcagcctaggtggggctgcggtggggaactacttgagatttgggggttcccatagacagctggggagcagaatacattccctttctaaagagtgtgcttgaattcagctgtcgctcattgttgctgtgggggaatatgggacctgtattgccagatctgatttttcaagaaaagccaggggctgggcatgggggctatgcctgtaatcccaacactttgggaagtcaaggcaggaggatcacttgaggccaggagttcaagaccaacctgggcaacataatgagaccccatctctacaaaaaattagccaggtgtagtggtgtatgcctgtactcccagctacttgggaggctgagttgggaggatcccttcaacctgggaggtcgaggctgctgtgagctatgatcatgccactgcactccagcctgggtgacagtgagaccctgtctataacaaaaataaaaataggctaggcgtagtggctcatgcctgtaatcccagcactttgggaggacaaggcgggcggatcacctgaggtcaggagttcgagaccagcctggccaacatggtgaaacctcgtctctactaaaaatacaaaaattagctgggtgtggtggcaggcacctgtaatcccagctactcaggaggctgaggcagcaaaatcgcttgaacccgggaggcggaggttgcagtgagccgagatcgcaccattgcattccagcctgggagacaagagtgagacttcgtctcaaaaaaataaaataaaataaataaaaataaaaatttaaagtcagatatccaactttgtatgtgcagttcccttgattttttttttttttttttgagacagggtctcactgtgtcactcaggctggagtgcagtggcacaatcacagttcactgcagccttgacttcccgggctcaggtgattctcccgcctcagcctccgaagtagctgggactacaggcgtgcaccaccacacctggctaattttgttcattttttgcagagacagggttttgccatgttgcccaggctggtctggaactcctgagctcaagcgatcctcctgccttgacccactcccaaagtgctggggttacagctgtgagctaccgtgcccagccagttcccttgatttttaaagaaaaattttaaaaaattgtttttactttacatacagtaaaattcgctttttgggggtgggggaagaagtgtcactatttacatagactcctgtgactcccactgccatcagggacagaacggctcatcccccaaattctctccggctgctcctttgtcttcagtccctcctcctcgctcttggcacccactgatctggctttgtcactatggttttgccttttgcacgtaaatggaatcatacagtttgtaacctttgggagtggtttctttcccgtagcataatcatttgttctttttggttagggaacacttgcttatccattcacttgttgagagacactggggatgtttctaggtttgggtgattatgtgtaatgctgctgtggacatttttgtgcagttttgtgtgggtgtgtgtgaatgtaagttttcatttctctaagataaggaaggataaggaagttcccttatatttctactttgttgagagtttttttgttttttttttttggtatcatgaatggatgttaaattttgccacttgatttctctgcatcttttgataggtttttcttctttggtcatgtttagattacatccattagttttcaaatgttgggccagctttgctgaataaaccccattcggctgcttgtcttgttatatttttcatatatatctcctggattcgatttgctaatattttgcagaggctcattgcatctgtgttcatgagggatattggtttgtagttttcttttttctttttttttttttttgagactgagtctcactctgtcgcccaggctagagtgcagtggggcgatctcggctcattgcaagctccgcctcccgggttcacgccattctcctgcctcagcctcccgagtagctgggactacaggcgcccaccaccatgcccggctaattttttgtatttttagtagagacggggtttcactgtgttagccaggatggtctcgatctcctgatctcatgatccgcccacctcagcctcccaaagtgctgggattacaggcatgagccactgcgcccagcaggtttgtagttttcttatattgcttttgtttggtttgggtaacagggtattattgctggccccataaaacgagttgggaagtggctcttctattctctggaagaggtagtgtagaatttatgtatattttccttaaatacttagtgaaattatctggtcctgaggttttcctttttggaaggatataaattgggaaattaatttctttaatcactcaaggactgttcagattatctatttcttcttgcatgagttttggtagtttgtgtttttcaaagaattggtccattagctcatctaagttgtagaaattatgtgtgtagaagtgtttctagtgttcccttattagccttttaaaggatgtaagactgtaatgatatctctgttttcttttttttcgagacaaggtcacactctgtcacccaggctagagtgcagtggtgtaatcaaggctcactgcagccttgacctccctggctcaagcgatcctcccacctcacccaaccccggtagctgggaccagaggcatgtgccaccatgcttggctaatttttttaatcttttgtagagatggggtcttgctatgttgcccaggctgatcttgaatgcctggtctcaagcgatcctcccaccttggcctcccaaagtgctgggatgacaggtgtgagccactgtgctcagcctcattttttatattggtgatttgtattctctctctctttctctctgtcattctggttagagatgcatcagttttgttaatcttttcaaaaaaaaaaccagatttgggttttgttgatttttctctaccagtctcatttttaattttattaatttctgctcttatctttattatttctttcctcccttttgctttgggcttgaattttatggtattgtattttcattttcatttagtttaaattatttttattttctcttgagactttggggctgggtgcggtggctcatgcctgtaatctcagcactttgggaggccgaagggggtggatcacctgaggtcgagagttcaagcccagcctgacccatatgaagaaaccccatctctactaaaaaatacaaaattagccaggcatggtggtgcatgcctgtaatcccagctactcgggaggttgaggcaggagaattgcttgaacccgggaggcagaggttgcagtgagccgagatcacgccattgcactccagcctaggcaacaagagcaaaactccatctcaaacaaacaaacaaacaaaaagatacttcatctttgactcatgaattatttagacacatactgcctaattcccaagtatttgaggatttttcagatgcctttctgtttttgatttttttgcttgttttaaaatttcttttcttttctttttttttgagacagtctcgctctgttgcccaggctgaagtgcagtgtgtgatctcagctcaccgaaatctccatctcccaggttcaagtaattctcgtgcttcagcctctcaagtagctgggattataggcacaggacaccatgcccagctaatttttgtattgttagtagagatggggtttcaccatgttgcccaggctggtcttgaactcctgacctcaagtgatccacctgcctcagcctccaaaagctctgggattacaaacgtgagccactgagccctgagactgatttttagtttaattatattatagtcacaggacttttttttttttttttttgagacagagttttgctcttgttgcccaggctggagtgcaatagcgcaatctcggctcactgcaaacttcgcctcctgggttcaagtgattctcttgcctcagcctccctagtaagctgggattacaggtgcccaccaccacgcccagctaattttttgtatttttagtagggatggggtttcactatgttggccgggctggtctcaaactcctgacctcaggtgatccacctgcctcagcccctcccaaagtgccaggattatagatgtgagccaccacgcccggcaagacatacatttataatttcagtttttaaaaatttgttgccagactctgtggctcatgcctgtaatcccagcactttgggaggctaaggcaggaggatctcttgaggccaggagttcgagaccagcctgggcaacatagtgagaccccccgtctctacaagaaaattagctgggcgtgttgacatatccctgtagtcccagctactcgggaggctgaggtgggagtattgcttgagtctgggaggtggaggctgcagtgagctatgatcacaccgctgcactccagccaaggtgacagagtaagatcctgcctccccaccacacacaaaaaaagtattatagtttgtttaatcgtccaagatatgatctacatgatctaccttggtgacagttccatgtttacatgaagagaacgtgtattctgctattcttgggtggtgtgttcgataaacatcaattaggttaagctggttagtggtggtattcagaccttttagatcccttgttgatttttcatctaactagctctactgttaaaaattagattttctatctaactggttatattctctagaggagtgttgaagtctccaactatgattgtcaatttgtctatttctcctttcaattttattagtttggcttcatgtattttgaagctctgtttttagggacatatgcatttaggattgttatgtatcttcttggtgagttgaccctttaatataatgtttgtctgaatccttggtaattttccttgtttggattaggcaatttctgttgttctatcactgtttgtactgtgatttccgttctgctattgatccaatccaatgaacttttatttcatatattgtattttttagttctaaaatttccatttggttccttttttctagcatctatttttctgcaagaatttcgaaatttccatttatttcggattgttcacctttactgaaccatggagcatggttataataacttttttaaagtctttgtctaataatggcaacatctgggtcatcttagcattggtatctatctattgattgccttttttttttttttttttttgagacggagtctcgctctgtcactcaggctggagtgcagtggcacgatctcggctcactgcaagctctgcttcctgggttcatgccattctcctgcctcagcctcctgagttgctgggactacaggtgtctgccaccacgaccagctaattttttgcatttttagtagagacggggtttcaccatgttagccaggatggtctctatctcctgacctcgtgatccgcccgcctctgcctcccaaagtgctgggattacaggcgtgagccaccgcgcccagcctttttgtcttttgtcttgtacattgttgtcagcttttcctgtttctttgtatgtcaagtaattttggactgtgtcttggacatttggaatactgtaagacactggggcctgttaaaatcctctgaagaatgtcagttttttctttgtttgtttattcgtttgtttttgagacagggtcttgctctgtcacctaggctggagtgcattggcatgatcatggctcactgcagcctcaaccccctggccttaagcaatcctcttaccttagcttcctaaagccttagggttacgagcatgagccactgtgcccagtctgtttgtttgctttttaaatcagttaggttgacgcctcagatcccaacctgccctctgtgaattatagtttcaatgtcagttcagttttcaaagcctttgcagtgctattcagatccaccccaagtatacatactccaggggccagtctgttcagtctacactgtagttcagttctcagagtctttggtaggttatttggggtcagttccatgtatgtgcagctcaggagtaggctaggacctcaaatacaacaactttatgggatcatattctcaagctcccttctttctgtgatgccgccctatccagcttccaggggcccctttttctcatttttttccaggtaaaagattttccctttctcggagttttaggtccccctgtgtgactgctacggctgctgccaccacctaacctttgggacaggttttaccttgtagggagggggctgggagagaaaaaagacccagggcacttctcccactcgatttttcccaggaggcccccctttcccggcttctcatcagaaagagagtttcttccgtagctttttctctgtgcacctgctgcacagttctgggatttgggctcctgagtctaggtcaggaaatatgcaagctcaccaccgtattcatcttacttaacgtttttgttttcctccccaattcaccttccactattcacttttcacagtccttgtgtagttgttttatgtcttctgtcagggtttttagttataatcaatgggaaagctagactgtagtgtgcttactccatcttaaccagaaccaggaggcttgcttggctttaaatattggcatctaattttaagtctgtcctcaagccacatctgagatgctagctggccacctctgctttagtggcacagtgtctcaaaattaatttttctttctttttttcttttgagatggagtcacaatcttggctcattgcaacctcccgcctcctgggttcaagcaattctcctgcctcagcctccccagtagctgggactacaggcgcgcaccaccacacccagctaatttttttttttttttttgaggcggagtctcgctctgttgtccagcctggagtagagtggcacgatctcggctcactgcaacctccgcctcccaggttcaagtgattctcccacctcagcctcccaagcagctgggattacaggtgtacaccaccacaccctgcctaatttttgtatttctagtagagatggggtttcaccatgttggccaggctggtctcgaactcctgacctcaggtgattcacccatctcggcctcccaaagtgctgggattacaggtatgagccactgtgcctggcctaatttttcttttaatactcaaattcttaagcaaaagttgtcagtaccaatgccagtttttctagattaaaagagagcagaatacagatttattctttctctggtcagagcaagcccctaaacctgtcagcataataatagtgattgcaattattttagcagaaataataattactggctaagggcatggagtctggaaccaggcctcttgtgttcagccgtcttctacgaactgtgtgaccttaattctgaatgactttgcctttctatgtctcagtttcctcccctgtaaaatgggaataataatggtatctgcttcccaggtggtggcgaggattaaacaaattcatatgcatagagcgctcagaacagtgcctggcacaaaggaaggctcgctaagcatttgctttgattcccgtgagtaatggctgacgtttattaggcaccttgccttgcagacagcttcacagcggcaagataagccggcttatctcacttgctcagatgaggcagctgagatttcagaaaggcaaatggcttgcttgagtccatctggccttcagaccttgaaattagggaggcgtgggtggctgggcatgggttcagggagtatctggctggtaatcaatcagacagcaacggcaacgaagctttttaacatcatctggtctgagctagaagagatgtgacccaggggactgagtggggggaaaaaatcagctcaaagagaaaggcaacagaaatagaaggggaagcctggtaattgagtggccccaaaaaggaaagatcaatattttacttccagtgaacaaccaatttccctggcagcaagctggggcccagctgtgtgtgcttcagtgacaacagctgcttctgcaatgcctgccaggcctggcgaacccgtctctcctggcctgggagccagagggggagccccagggctgcccagccacgcatggtgtgtgccccagggtgggggcggcccccagctcccctgcctggggcccaggctccccacgaagaccacatggggtggctatttgctatgctccctgcgtgaccttgagcaaacccctccccccgctgggacctcgcttcaccaactgtgaaatgacgggctgggtcagtggaatgtgtctggccgaggaccatctgtggcaaaaggttacctgatgtccaggaaggtcgagactctttgtgatccaaggcgaggggtccccacgtagtgagtaaagcttctttgatgctcagggcgccaggggatagaaagaacactttagtgcagacagccccgtgagagtctctggcccaggaaggcaacagggagcagtggctgactctctggggtcagtaagacctgggttcaagagttgccactacaggtgggcaaaaattttaaatttaaaaaaaggaaaataaaaggggagcgttaccactgcagtgactttgtctaaatgtcttaccctctctgagcctcagtctcctcaatttaaaatgggggactataataatagctactgttaagtttgctgtgaggattaaatgagactatgtgtgaaccctccgtggactccaagcatttgcaatacttctccacataaatgatgctgttatttattttaaaaatcactgagcctgtggttgatggtatgtattggtaataaccagcatgcattgttctaataatttcacacctgttttcttttttttctttttcttttccttttttttttttttttgagacggaattttgctcttgttgcccaggctggagtgcaatggcaccatcttggctcaccgcaacctctgcctcccgggttcaagcgattctcctgcctcggcctcccaagtagctgggactacaggtgcacaccaccatgcccagctactttttcttgtatttttagtagagacggggtttcaccatgttggccaggatggtctcaatctcttgacctagtgatctgcccaccttggcctcccaaagtgctgggattacgggcgccaggcaccacgcccagcccaatttcacacttgttttctaaagggcaggacatcagtgtgcctggccatttttgttttttgttttttgtttgctttgagacggaatcttgccctgtcacccaggctggagtgcagtggcacaatctcggctcactgcaacctccacctccctgtttcaaacgattctcctgccttagcctccctgagtagctgggactacaggtacacatgaccacgcctggctaatttttgtatttttagtagagacaggggtttctctatgttggccaggctggtctcgaactcctgacctcaggtgatccacctacctcagcctcccgaagtgctgggattataggcatgagccactgcgcccggctggcctggcacttttgtggccactactctggggctgccactctttgaagagccctgtgggagcagctgtagagaggtcacagcctggggtgtgcccccggttgcagcttgggccatggcgtgggtgcttcggggaccatgcagtggccctcagtaccccatctgtctgcctgtcatcaaacaaccccacccccacctctgtcccaggtaggcttttgctggcagaggaatggacagctcgccccaccagtgtctcccagcctcagggagctgtggacacagggattacagaatccaaatccctgcactcctgcctcctaggtggacttgaggtgagggtcctcatcagtcagtcagcactctgtggccgactccacccttgacttgcttcagaaataatgaaggcagagccctgaccttggagaggactgtaggcctgagcatgggaggctggagggtagagggtgccctggctcatccccacattcacaggccccctataatgccagcgatgcaaaggcaggaggagaggaggcggaatgccagccaggatggtgggtgggctcccctgcagccctgcaggtggcacctgggcattgctattctcagaagccacgtcattgcctggcagtgtcagaggctggcatggctggggggagggggcagctgcaatgttgaggaggctggcaaaaagccactttcctcctttactgaaattttgcaggtctttcctgagagcccactaggtaccaggttcagggaggttcacagaaagaatgtggcacggcccctctgcccttccctcaccccagactcaccccagagtggaaaagcagggtcagctggaatcaagatgcaagcacagagccgccaggttccaggcaaggagaagatggttagggtggggcctctttgtccactgctcaccttccaaagcccactgggcacagcccccatggtgccaggccaccggcagtgaccagggcttcagacccctgctgcagctgccacgctgtgggcatgcaagaaaaacgtggtccctataaatagatgaatccccaacgtggtttggcttcggtgcctgtgatgggtggtgtggtatgccggcgagtctgcctgtgatggcgtgaacactgacaacagtgactgtgagcagtttcctgcatgctgtgctctgcaggccccgggtgccctcagatccatcatctgcagcccagcctgagcagattctggaaagagctcatcctggcctggctgtgctatagatactgatggtgattattagggggagcggcaagatgcctgacaaggagtgtgagcgtgtacacatgtgtatgcactattgtgtatgtgtggctagccagcagaaccagcacctaccaccatcaacccctgaaagagtgcctggcatgtaagaggtgctcagtcatcacttgttgaataagtgagtgaatgaatgaatgaatgcttgtatgggtgctgtgggagggctgccactaagttttagaagcagttttagatttagaagcaggcttctgagccaggcgtggtggcgtgcctgtagtcccagctacttgggaggctaaggtgggaggatcccttgagcccaggcatttgaggctgcagtgatctatgatcatgccactgcactccagcttgggcaataatgtgaggacatggctcttaaaaaaaagttgttattattatgatgatgatgatgattattattattatttgagacggagtttcactcttgtcacccaggctggagtgcagtggcgcgatcttggatcactgcaacctccaccttgaaggtcagaggttctcctgaccttggagaggattgtaggtgtgagcaaaaacaaatattatgaagcctctactatgtaccagtcacggtgcaagcgaccaggtatacagtggtgatcagaatggacagggtccttgcccttagggagcttactttgtagagagaagatataaattaatcaaattatcccacacacatacaactacatgaaagagtatggagaaactaaggctaaggctttctgcagtgaggtcgggagatactcacacctgctaaagttcaaaccacacaatatcccaatagacttgggtgtgcaaccgaagtcatgatctgccagtctccagcatttctcagctgcgagtgccctgactagctcaccagtcagaaaggctttgcaatctaggatttctgcccagccaatgagctgcctctgaaaacaactttctgtggaaatcctccgtaaaaattggtctcctggctgggcgtggtggatcacgcctgtaatccaagcactttgggaggccaaggtgggcagatcacctgaggtcaggagttggagaccagcctggccaacatagtgaaacagcctctctactaaaaatacaaaaattacctgggcatgttggcgggcgcctgtaatcccagctactcaggagaggctgaggcaggagaatctcttgaacctgggaggcggagcttgcagtgagctgagattgcgccactgcgctccagcctgggcaacagagcgagattccatctcaaaaaaaaaaaaaaaaaaaaaagaatccttcctccacttgcctcctgggatgctcttcggggctgtcctgatcccgtgtacctgaattgcaattctttgtttcccaaataaacgctatttcctttgacctccatgtcaatctctttttagttaacaatagcaagttgcaacaaattgtttgaagggaaagtataggatgctacaagacaggatagcagcggggtgggccctgattggatgggggtggtcaggacagacctgtctcagggagggacgtttcatagaggtacaaagggagacctgaaggatgaactgacatggcgaatggggaggacagctgtccaagttgtagggaatagcatgtgcaaaggccctggggcagagaagagtgtggtggtttccgtgaggagctgaccaaaggccagtgcagctagagtacagtgagtgatgaagagcatgggaggagagggagtggaaggggtcagatcacatggggccttgtgggccgtgttgtggagtttggatttttttttttttttttttttttgagacagagtcttgctcagtcgcccaggctggagtgcagtggcgtgatctcagctcaatgcaacctctgcctcccaggttcatgccattctcctgcctcagcctcccgagtagctaggactacaggcgcccgccacgacgcccggctaattttttttgtatttttagtagagatggggtttcaccatgttagccaggatggtctcgatctcctgacctcgtgatctacccgcctcggcctcccaaagtgctgggattacaggtgtgagccaccgcgcccgccctggagtttggatttttatcctaagtgtggtggaatgatactggaaggttttaagcagaggagtgggtgacacgatccagttagacttgcatgatccaggagagacaggatgatggctatgaccaggtggggctcctgagaggtgtgggaaatgagggagctgtgggatacagtgggagcatggattgaatgtgagtgacagtgagcagacgcagtgatgctgaagaaccctgcagtggcaggaagggagggaggacggggtcagggagtgggacatttgatgggtggtattggagggggtgatcactgggttgaccaagggacttggtgcctgaggtggaatatgaggcaaaaagaaagtcaaggatctgagaggccgggggttgatgggtcatccacacagctgcaggaacccccaaagatgaattgtaaaagcaaaaagctggaaataaccaaaatgcccagctattaggggtggtgaagtaaattatgatgaacccaccgggcagaatgtgttacagccactaacaacgtgggttgtacacaccaagcagcatggaaactgtttctgtcctacctcctgttacacgggagagaaactctccaacctcagggatggctgactctgccaggtgaaaacttacttccttattcatctaacactcttcattgaagtgcaaggtacaaatagaacagaaaagttcatcagccaccagtgtccatctcagtgagtttccccatctagccagcacctggaacaagaaatagaacaagagaaatggtgggatttctgggtcatttacaatgagtttgtgtctgttttgtgtgaaagaaaccaattttaaaacatcggcagagcctcggctttcattgtgcagtccctgggggaaggaggctcggcccctgaagccgtgtgctcagggagggtgtgctcagggaggagccggtgttggctctgcttttctttgcccgagttgtctgtcaccatggggagaataaagtggccccatggctgatactgaccccagggtgagggtaagaggactgggcggggacactggtgtccctccctccctcccagcctccccacccagctccctgagtcttcgggagatccttgggtgtctcacacctgtccctgcttcattcccacaggtggaaaaacttgtgaaatatttggatcccaacgacctggggagaatcaacttcaaggacttttgccggggggtgttcgccatgaaaggtgaggtcttcccgggaggctttcccaggcgctctccggtcctgcccagctggggaagctggtgtgactgggggcccagcctggattcctccccacaggggtcccagagcccaggatgggccagaagtcggttctgcctctggcttccgggggggccagaggagaaggacactgttgccccagccgtggggggctgtggtctcacccatggaagtcacttctgcccttccccttgtctgcccgcctctggagaaagcctccttccctgcttttctgtcctcttcctctctctcccgctctggggtgaccaaacccagtgagtctcctgggatgtgggagggactccacttttaagaccagggcagtcctgggcaaacctggacaaagcgctggtcacatgactgcccgcctccctctgagctgctgcttttgtgtcctccctgctcccgcctcctctttttttttttttttttgagacagggtctggctttgtcgcccaggctactggagtgcagtgccactatcatggctccctgcagcttcaacctcctcggctcaagcaatcctcctgcctcagcctcctgagtagctgagactacaggaggtacaccaccatgcctggctaatttttgtattttaagtagagatggagttttgtcacgttgtccagcctggtcttgaactcctgagatcaagtgaccctcccatctcagtctcccaaagttctgggattacaggcatcagcctccatgccctgccctctcttcctcttaattcttcctaattcctgcctttcttccttgcccctgcttccagttttaaggggacaatataaatccctctgtcttgtcccaaaaattcaaaggccagttgtgagaaacttgcaggaatcagaatatggccactcacttactactaagctgtttatctgagacagtgagggccaggcacggtggctcacacctatagtctcagcactttttgggaggccgaggcaggcggattgcttgatctcaggtggatcacttgagtccaggagtttgagaccagcctggccaacatggcgaaacctcatctctacaaaaaatacaaaaaattagccgggcattctggtgtgtgcctgtggtcccagctacctgggaggctaaggtgggaggatcacctgagcccaggaagttgaggctgcagtgagctgaggtcacgccactgcactccagcctgggtaacagagtaagaacctgtctcaagaaagaaaaaaatctgagacagtggcataggtcaccagccaggtggacttgctaaggcctccccactagctgcagagagaatgcagtcacttctggagtcccagggtgtctgcttatctgtgaaggaagccatggtttcctgtctgcggctcagatcaagtttagcccttttctgtggggtgcctatgagtcctgggagggtggaacgatgcagggtgagggatgaagggaaccaaatacacggtgcagggggcacagaacacagaaggtgcccagggaaggttttctgcgtggatttgacaatgggccactgcaggctgcacctgccatgtgcctgtgccaggcattttgtcaggtccccctcccagttcagtacaaccttggggcgtttggttgggatctcaggagcgaggccagccgtgtacagagtcagcaggaactgcagctgtcctgcgggcagccctgtcctggacgtcccagggtctgcaggacacggggggcgcccagcctcggaggaatgggtgtgtttgctttctccagaggctggcacagtcgtttggagtccctgcaagccaggtgggcagcactgccttaggtcccctcccccaggaaggcctccttccttcctgttgccccagcctgccctctgtgtgtgggaattagtcccagaggacaagggcctcttgcagctccctccacagtgccttgagctgagttccccaccgcctgggctccatccctgccttccagtgctcagctggcctcctggagcctcgggcccccacctcagcccttcccaccctatgcccattagtcagaagcagagcagccgtcccaggctgaggctcaacccctcactgtcccgtgtgtctgcctgtctgcgcagggtgcgaggagctgctgaaggatgtgctgtcggtggagagcgcggggacgctgccgtgcgcgccagagatcccagactgcgtggagcaggtaaggcttggggggcctcaaggacctccatggctctgcctcctccttcttggtcttgcctttgctccattttcagtatctgggaggacccagaacctccctctgaggacccttcttgagcatcagagtcaagaaatagtttttggaacaggagccctgagtccccttgggaagccccagcagaatgtgtaacagctgggggtcctcacccagcaactttatttcccatctgtggcacggaggagagactgagttccagacagggaaagtggcaagtggaggggaggcaggactagaattgtttccttttcttctgcaccatcgctctctgagctgaacgcttcctgtttgtttgttttcaaacaacaacgaattctccaattctctgacactaactggtgtccagcaatcagttccacctgccactaactacccagcattagcacagactccatgagtcaaggtcaactccatgagactgccccacctcccacgccagctgcagttcttcctggataactgcaaacacagggttcccaggaccacctccctcgggctgggtaattcactggaaacactcaggaaatggttgtacttacgatgatcagtgtattacaaaggatacaactcaggattagccacacggaagagatgtacaagacagggtatggggagcagggatgcagagcttccgcaccttcgcttaggggcgctgcctcccagcacatcaccgtgctaccagcacccgggctctctgcatctcattgttcaagaatttgtaggcctggcgtgatggctgatgcttgtaatcccagcactttgggatgctgaggcaggaggacagcttgagcccaggagtttgagagcagcctgggcaagatgatgagaccccgtctctacataaaaacttaaaattagctggatgtggtggtgcacacctgtaatctcagctactggggagactgaggtgggaggagcacttgagcccagtagtttgagacttcagtgagctgtgattgtgctactgcactccagccagcctgggtgacagggccagactcatctccaaaaattaaacagtttttacaacccagtctccagcccctctcctctgcctggaggttgggggtaggtgggaaggtgagaaagttcccaccttattgtatgcttggtctttctggtgaccaaccccatcctgaagctctgtatcaggaagcgggacaaagaccacagtccccaaggctctgtttttctgttatcattgcctaatggtgtgtttcttatgaaactttgaactagttttccaagcagtgcagcttcatcctacagagaaacagttgaaggtgcacaagctgacaaccagcgaggtccctcctggtggcaacacccagaactagaagaggatgattttgatttcttacccagcccaacccccaaaccttttccccagttctgatgggtgcctcctctggaccccaaaacatgagtatgtttatagctgaaggagatccaggaccccagaggccactttggctgatggtaggcctcttggaatccagctgggtcgtggggtcagggttaggttccctgggcaggactggaggagggacagtccacagagagggacacagtgctgagggctgccaagtccatggtggcagagaccaaagccaggcaccaactgtgggccagggcccccaggctgggagtcaggtggctaggcctcaggctgctgtgctcaaagcaagagccctcagggatgcgtggagatagctgggccccaggcccatgcccatgccagcagtgatggctccaggcctgtcttgatgggtccagcaagcaggggttgaatatgtatttggggccagctaatggaaccaggattaggaaagaggacctccactgtgggacaaatactgagtgccccaggaactttgctgggggggcccttcctggattgctgagcaggaggcagcgtgcagaggtgtgcaggactgggtccatacccacgtgggccacccaggacaggccatggaacctgagcacgttcttctcaaccccgctgagcgtcagtgtcctcaactgtaaaacaaggcttgctgtgccaatctggagggtctgttgtgaaagttcagtgggaagacagacccctaatacgtgctaattcctcgccgcctgctgctgtaagaaaatggtgctgaagttaccatttgcatttttcagtttaccctcggatactggtgttgcaaaattatgttaaagtaaagccctgccccaggaactggagggcagagtggagccgaggcctggggagagggggtgggagttggggtaggggtgacgtgttccctgtagtctttggctgcttttgtggcccccacattctgccattcacacctctggaaaaggtggcacatggagaaaagatgagcagggggtgcagaagagtgggcctccaccaaggtactcttttttgtaaaccgatattgctttcctccaaagtctagaggttatgggaaagcagaaagaaagaccgcgtcagcctatctcagcaagcctggtgcttctccttgtttcttcatgggactttgcaatcctataggtttttgttgctttgggttttgttttttgttttttttttgtttttttttgttttttgttttttttgttttttttgttttttgagacggcatcttgctctatcgcccaggctggagtgcagtggtgcaatctcggttcactgcaagctccgcctcccgggttcatgccattctcctgcctcagcctcctgagtagctgggactacaggtgcccgccaccatgcccagctaatttttttttgtatttttagtagagatggggtttcaccatgttagccaggatggtctcgatctcctgacctcatgatccacccgcctcggcctcccaatgctttggattttaagcttctcgtgggtgaactcctttctgccctccatggaggtctggccccggcttggttggccagagcctagtgagatggcggtagctgtggacacagtggcagccttgttcattatgctcgctggggctgcttggttgacctggactccattccctaccatgggcttctgcgtgttggcagggagaggaagggggcacaatccgaagaccagcctgacggggcagacggcttctggattgtgaatgagtcctcttcctggcttaggctcctgtaatagcaaggtcaagaccacagctctgcagatgaggtgtcagagtgggctggactgggcaggtccgaatttctcaggcccggctctctgcgccctgctgtgtcttagctgtcccctaggggtcagtctgagactgagaagaagcgggtgcctggatcactacgtaggcttcccagatgcccccagggaacgcaaacctgaggcatgatttgaggaggtgtggggatgacacacagatgggatggcaggcgctccatccctgtgccatgcgtgtatgttgggaggtgaagcttgtttttcgggcacagccccctcccctcagggtgtggacggagacctctgacttaaccactggatgtggctcgtaattaaagcagtgaatgcttgagtgctggctggtgggccagcagctgccacctggcccctgagagcaccctgcccttcttgaccccctcccaggccccgagaagcctctagcgttgggcatcaagcaggggcccctggggttgctgtccagacctcaggccagtgcaagtctatcccgggcagttgatgcctggatgcaccagttcctgaccttactggatgtggctccacctgcgtccccagagccctgcgagaccctggcagagggaaactttgaggcttgggaaccccaactgttgagcaggctgttgagagagtttcctgacccagggaaatttgcttctggtcaaagggaatgttaggtgtgtcctgaaggactccccaggttccctgggtccatgcatggggtccctggaatcgccctgggagtccctctgagactgtcctgctcaggctgcccatcagcccccagtccatatgctataggggcccccgtggggagggggcatggagacacgtggagagcccgacactcgggtgctaaaggcaatgggatagttgctaggggcccgtggtcacccctcagcaggcagtaatgtgaaccctaatcctacaagtgctgtaaggccctgggccctgttcatccaccctatggtggatgaaatggagagggcatccagccacctgcccctcctgtgtagccaccacgccagcaaatggtgtcagtagcctccaacccagagagtcatcctcagcgcctcctcatgcagctgccttgagtcctctgttccccactcacccctgcctcccccttccatcacagccactgccacccactgaccgggcgtcctcctgtcctcagccttcctctctccacacccccatcccgctcctgggacccgtccttaccaagggatgaaaaccaacatcagctcctacccactactctagcctcatctctcaccatggtgcatctcacacctaaaactggcgataccaaaccgctccccgtttcctgagaaagccatgttctctcttgcctctgagtgttatctttctcctaggatgtcctccctcccgcttccttgtcaggagctaacgtctactcacctttttaagacttacttgccgggagtggtggctcatgcctgtaatcccagcactttgggaggctgaggtgggaggattacttgagcccaggagtttgagaccagcctggacaatatagtgagactgcttctcttaaaaaaaaaatttttacttaggtaccgcctcctccaggaagcctccctgactccttctgccccagcccaaaggagaaggacctgcactgagcttcctgggggcccttcaccctctaccactgcctgaacctcacccttcatgacagccagccccatgtccacccagtggcttcagggctcaggctgagctcctccttttcacccccaggacagcacccacagcaagcatcgttatccatgctccttgggtgtgtctctaagtatttctagaactaggtatctggaagcagaattgctgtgtcaaagggtatgtagattttgttttttaacagatacggatgaaattttcttccacaaagcctgtaccatttgtatcacccaagcactatatgagattgcccctttccccatggccttcgccaaccccggaagccatccatccacctgctggtctccggcctagcagcctgaggggaggaaagcccattgctgccgtcctctgtgctgcccagcttcctagggaggcggaccatctttttcttatcttcccataccctctggatttctgcttttacgaattagctattcatattctttgcccattttcgatatggttgtttgtcttttccttattgatttataagaaatctctgtatattctgttttttgcttgtttgttttttgaggcagtctcgctctactgcccaggctggagtgcagtggctcaatctcagctcactgcaacctctgcctcccgggctcaagcgatccacctgcctcggccccgcaattagctggtaccacaggcacacgccaccacatccagctaatttttgtttttttgtttgtttgtttgtttgttttgtttttggtagagacagggttttgcatgttgctcaggctggtcttgaactcctgtgctcaggtgatctgcccacctcggcctcccaaagtgctgagattacaggtgtgagccacagcaacaggttgaaatctctatatatcctgattatcaatctttatggattttgcttgtgttttaatcttgttttaggagtgttttattacacagaatgttaattctgatgtcatcatttatcaacctttttatgccatttgcattttgtgtatcattttgtgccttctgtacctccaggctataaacatattctcctatatatagttttcagatacttttgagaaaaagaagtatttatgcttagctcttttatccacctggagcttatttttgcttttggtgggagtagagatctggcactcttacttcctcaatatggccagtactttgagttcctaatgttgaatagtccctctttctcaattgatttgaaattttatctttattgtatgctaacttaccttatatacgtaggtctctttctggactctggtctgttatattgatctgtttgtctacctacttttaagccaaaaccatagtttcagttactcttgtttatagtttgatatctgatagggaaaggctctctcatccttctttgtttctttaacctttaaggccaggtgcggtggctcatgcctgtaatcccagcactttgggaggccaaggcaggtggatcacccgaggtcaggagttcaagaccagcctgaccaacatggtgaaaccccatctctactaaaaatacaaaaattaaccaggcatggtggcacatgtctgtaatcccagctacttgggaggctgaggcaggagaatcacttgaacccgggaggcggaggttgcagtgagctgagatcacgccattgcgcttaagccttggcgacaaagtgagactctgtcatacacacacacacaaaaacaaataaaaaaaactgtttttttgttattcttacatattttcttttctggaacagcctttttgtcaagctctattgcaaatcctgtaggagatcatatttgaaattaaatttgtgcattaattgaaggaaattggcttctttacaatattgcattctgtcatccaggaatgcatatatcttttcatttattctggccttttatgccctctaggaaagttttctgttgtttttcttttttggttttttgggttttttgagatggagttttgctgttattgcccaggctggagtgcagtggctggatctctgctcactgcaacctctgcctcccaggtccaagcgattcccctgcctcagcctccctagtaggtgggactacaggtgcccaccaccatgcccggctaattttttgtattttcagtagagatggggttctactacgttggccaggctggtctcaaactcctgacctcaggtgatcctcctgcttcggcctcccaaagtgctgggattacaggtgtgagccaccgcatctggccggaaagttttataattttcttaaataggttatgcacactttcttcttagggtgactatatttggagtttttgtgctgatatgtgtaggatctttttgctatgatattttataactggttacaactgatgtataggataggttttcatttttggtgttaatcttgtcatgataaccctattaaactctccttattttatttatttatttatttatttattgaaacagggtcttgctcttattgcccaggctggagtgcagcagtgtgatctcggctcactgcaatctctgcctcccgggttcaagcaattctcctgcctcagcctctcgagtagctgagattacaggcgcccacgaccatgcctggctaatttttgtatttttagtagagacggggtttcactatgttggccaggctggcctcgaactcctgacctcaggtgatctgcctgctttggcttcccaaggtgctaggattagaggtgtgagccaccatgcctggcccattaaactctctttatatttaatagtttatttatatgctattttctatcatgcttaattctatataacaaggtagccatgctgccattttaaattttaaatggcaacatgatatttcatcacatgaagacaaccaaatttatataccagtttcttattgttgggcgtatatacactttttttttttttgagacggagtctcactctgtcgcccaggctggagtgcagtggtgcaatctcggctcaccgcaagctccgcctcctgggttcacgccattctcctgcctcagcctcccaagtagctgggactacaggtgcccgccaccacgcctggctaatttttttgtatttttagtagagacagggtttcactctgttagccaggatggtctcgatctcctgacctcgtgatccacctgcctcggcctcccaaagtgctgggattacaggcgtgagccaccatgcccagccaggtgtatatatatatttttaacgtaatttggggaatgaacaaaagcagtgtaataatcattcttatagctaagtatttccccacagcagcaatcgttgctttaaagtaaatcagaggttggcaaattacagaccccacgagccaaatctaggagcttgttattgtaaataaagttttactggaacacagccacacccatttgttcacatcttatctgtggctgttttcacactacagtggcagagctgaaaagctgccacagaggccaaatggactgcaaagcttagaatatttactgtctgccctttacagaaaaaatttgccaacccagacggtaaattcaggcaagtggaaactgttttatgaaaaggatgcaaaggctgggcgcggtggctcatgcctgtaatcccagcactttgggaagtggaggcaggtggatcacctgaggtcaggagtttgagaccagcctgaccaacgtggtgaaaccccgtctctactaaaaatacaaaaattagccaggcgtgatagcgcatgcctgtaatcccagcctctcgggaggctgaggcaggagaatcccttgaacccaagaggcggaggttgcagtgagctgagatcgtgccattgcactccagcctgggcaacagagtgagactctgtctcaaaaaaaaaaaaaaagaaaaggatgcaaaatattaaaactgcctaatactaatctgccaaattcctctgcaggaatcccatcaggattgcgtcagattcctgctacccttttgatactggtgttgctgagttttcagatcctttaaatttgagaggctaaaattagaacccctcttttgaattataatacagtttaacttcttaaagtacattttttggtcactaagagggcgttcttcatgaattgcctgtcgacattctccaccctggctatgtttacttctattgagtattttttaagaaccagaaatataactttttgacatacattaaattttttccagcttgttatttatttttaactttgttcatgataccaaatttaaaaatttttatagccaattcatcattcttttcctttatggcttcagcctttggtgtaatgcttataaatgctttcccgcccaagattgtgaaactgttctgttttatttttgtgtatttgatttttaattcgtagaattgactgatgtctagagtgaggtagggatccagtttgcctttttcctgtcagttcctcttgccctccctcacctggctggaaccagcagcttcttgctaggctatgcttacgcacgcagtcccctgatggcaaaggaagtgaggtttgcccggtgcagtggctcaggcctggaatcccagcactttgagaggccgaggtgggcagatcacttgaggccaggagttcaagaccagcttggccaacatggcgaaaccccatctttactgaaaaaaaaagaaaaaaattagcctggcatgatggggcatgcctgtaatcccagctacttgggaggctgaggcacaagaatcacttgaacccagaaggcagaggttgcagccagcagagattgtgccactgcactccaggctgggcaacagagcaagaccctatctaaaaaagaaaagaagaaaagaaatggggtttgctgggaacccagacctgagcctgagcccaaattggctcttttgctcatattcagaaggggctttgccaaacccttgtcttcctggaagtttttaaaatgatgataacctgtgcctctctctagaacttgctggggaggaggcctacagcctgaacatctaagcccaccctcgcttcatttcatccatcctgaaacaagcatttctaaaaccactcatgacaatggcacttataagttctaaaaatacttttcctgacaaacagcactgtgattcactgtgctggtggaggtgtgggtggggtgccatgctcccactggtgtggtggcaggagggagtttcagagcccagggaagcagcctttctacttatatctggccccaatatatttttctatgtttcaacaccccccccacccttctaaagagaaaaaaaaatctacttatcccaagcctcagagcttctgtaagatcctcgatttgtgtctttgggaaataactcaactctgattaagccaaaggtggcggggatggaagcagtgcagatatggaagccccttttgttcgttgcctcagcctggtctgccctggaccgtgtgtcttctacctcctacccctgaccatccctaccctagagacgctaagctgagctggccagcaagtgctacttcccacgggccacctcctgcctaacccaaccctgacgcccaagtccacatgtatctttagaacctactcaccaagttagagcttgacaaaaccttggagaggctccttacatcccgtctttttaaagctgagcaggagggaaaaatttgggttttatgaacctgtaggacattaaccaccttcgtatatacctttccagtctcatttcagcatcctttctttccctgattacatagactttgatccctccccttctcctttggatgagttatccctacctgctgcttccctcattaatgagtctagtgcagtgcatttttgaaacagtaactgtgggaaacacacaaacacaatcacatgagggcagatgttctccgagaaagcacggtcgaaaccagtggggactctgggttagcagggcctatggtgcttcatgtgtcagaggctgaactgggatatcagtggagattctaaactcaccatccagtttataaacctctgagggcccaagctcctgctgcagatggtgcaagaataaagagtagatcacttttactaaacaaagacctagagagttgacttggtctccaactttttattttgaaaattttcaaccttcagaaaagagcagaacaatgaatccacatatatcctttgcttggatgacagctgttaacatgctgctaaactgagtttctctgcccctgtgtttgttggtggggtgcatgtgcatacatactactttttttctggaccatttgaaagttagttgcggacatgacacttcatccttaaatacttggccattcctaagaaggacactctcctatgtgaccacaatatagttatgacttgcaggaaacttaacattggcacaatttgttacctattgtaaaatctacattcaaattttcccaattttatatatatatatatatatatatatatatatatatatatatatatatttttttttttttttttttttttttgacacggagtcttgctctgtcacccaggctggagtgcaatggcgtgatctccgctcaccgcaacctccgcctcctgggttcaaacgattctcctgcctcagcctcccgagtagctgggattacaggtgcatgccaccactcccggctaattttttttttgtatttttagtagagactgggttttaccatgttggccaggctggtcttgaactcctgacctcgtgatccacccacctcggcctcccaaagtgctgggattacaggtgtgagccaccgcacccagccatcccaataatatttttatagcttttatttttatctcaaatctaatacaggatcacacagtagtttagttgccatgtttctttagtttcctttaatctagaagagttccttggctttttttttcttttctttctttctatttttttctttttttttactcctaatgacattgacctttttaaaaacttcaggccacttgcttcgaagaatgcccctcaatttagatttgcctttattgattttctggtcctttggggtactgcaacttaaatttaaattaaaaataaaatggtgtggcgaggagggggccaggaggggagttctactgtgtttatttttcaagtctaaaacacatttaaaatgcatattgttggcacccactcagtgggcctcagttttcccagctgaaacatgatctaaacaccccttgcagcttctgtcccttctggcatttggggaaaaataaatgcctaattgtgtgtgtgcggccgagcgtccacccttggcatctctcaaattgtggggaggcagccggccttggtactttctggctccaggaacacgccatgggccattgaacgtctgtgcgatgggtaacgtctgtgcgatgaacactgtacactgggtacagtgttaggaggtgtgggctcttatacatgaccaggccacatctccatcctctttgggctgagattaggacattggagtaggtgtatttgtctcctgagaggggcaatctcaagagaaaactagaaaagaccccccccacgtctttggggggattatctgagataatgtggggaagaaatccaagcccctaagatacactggacggtgcttctccgggtacctgtgcccgagggagataccagccacttgctgggacaccagggggcatcttcctggagcagcagattgcctggaagaattggagaaaacattgtccaacattaaaacaaacatggaacataataaacatattttgaagataagaaagaagcctgtaatcccagcactttgagaggcccaggctggaggatcccttgaggctaggagttcaagaccagcttggacagcaaagtgagacccccatatctattaatacaaaaaagacaggcgggtgccgtggctctcgcctgtaatcccagtactttgggaggccaaggcgggcggatcacgaggtcaggagatcgagaccatcctggctaacacggtgaaaccccgtctccactaaaaatacaaaaaattagccgggcgtggtggtgggcgcctgtagtcccagctactcgggaggctgaggcaggagaatggcgtgaacccgggaggtggagcttgcaatgagccgagattgtgccactgcactccaacctgggccacagagcgtgagactccgtctcaaacaaaacaaaacaaaacaagacaaaaattagctgggcttggtggcaagcacctgtgtgtcccagctacttgggaggctgaggcaggaggattgcttaagcccaggagattgaggctacagtgagccgtttgtgcgacagcactccagcctgggcaacagagcaagatctcatctcaaaaaataaagtaaaataaagataatgagaaagacttttatcaattttattttactttattttatttatttatttttttgagatggagtttcactcattgcccaggctggagtgcaatagtacgatcttggctcactgcaacctccgcctcccgggttcaagcgattctcctgtgtcagcctcccaagtagctgggattacacacgcgcacccccatgcccagcaaatttttgtatttttaatagagacggggtttcaccatgttggccaggctggtctcgaactcctgacctcaggtgatctgcccacctccacctcccaaattgctgggattacaggcacaagccaccgcgcccaactgctgtattttatttttgagacaggatctcactctagcacccgggttggagtgcagtggcgcgatctcagctcactgcaacctccacctcccaggctcaagcaatcctcctgcctcagcctcttgagtagctgggactacaggcatgcacccagctaatttttggatttttggagagacagggtctcactatgttaccctggttggtcttgagctcccgggctgaagcgatccacctgtctcggcctcccaaaatgctaggattacaggtgtaagccaccgcgccctgcgggaaagactttttaaattgttttgctttagaggctgctctttcgagtcccacttctactgtagacccatgtccatcttctgctgtggggccgctttatgtaaggtattactgttattgctattttgttttccttttcttttttttaagaaacaaagtcttgctctgttactcaggctggagtgcagtcactgcagcctcaacctcccaggctcaagcaatcctcccacctcagcctcctcagtagctgggaccacaggctcataccaccacatccagctaatttttttttttttttttttggcagagaccgggtctagctatgttgcccaggatggtctcaaactcctggcctcaagcaagtctcccagctgggcctcccaaggcactgggattacagtcatgagcaacctctcctagccctgttttcttgtaataaagtaaatgcagtgttcattttagtaacaaaacaggtcttcactgggagggagaaatgaggaaatttgaccccgcgtggctgaggcctggaatgagctccatgggcaggctccaggaatgatgtaattttgcctcctctcaaggctggcctcaaggaggcctgattccagccctctttgtctggggctgccctgaacctgtaagaatccttctgaccagatcctccagacactgcaaattctcacccaggttgctcagaatcctggaaagagctcaggtttgagtcaaacgggctgagtgtgggttctgcttgaccactttctgtgtgtcatttggcaagtcgcttcacctctctgagcctttttcatttctgcctatctaaaatcagagtcgtcagcctgattttcagtgttgtggtgagaatgcaatggattaatgtttctaaaggttcctgaggagacaggtcccccagtcagtagtacctatgcctgcattctctgtaccactcagaaccctcaggggaatcattcaggacacaggggacagaattccctccccttcccattcccaaagtcaccagcctgcctccacctgcacccacactttcagcttgctgctgggatggtgagtggcatgaccctgctctgacacaggccatgccctccaatcccagctcctcacccgcacaccgcctgaacactggatcccagcccctcctgccaactcaagcactcgccttcacaaacagcccctcacccacagcacccgcaccacgcccctgctgggtcctttccattcgcttctggagctgacataataatgcccttcccatgggcagggaagcacccgcttgaccacacatcctggctttctttcctttggtctatttcctccaaagactggtctcaactccctttcttgcctccctttctctctgttgccactcccaatgatgtcttggcccctctgttctgctgaaacacttctcacagtcaccagggacttctttttgagacaggggtctcactctgtcacccaggctggagtgcagtggtgcagtcctgactcactgcagcctccaacacctgggttcaagcaatcctcccacctcagtctcccaggtagctgggaccacaggcatctgccatcatccccagctatttttattttttgtagagatgggggtcttgttctgttccccaggctggagtgcagtagtgcagtcctagtttgctgcagcctcaaactcctggcctcaagcaatcctccaatctcagacccccaaagtgctggtatggcaggcatgagccaccttgcctggccaccaggaacttctcactggccaaatccaagcatcagttctctagtcacatttttacatagtgatggtgtgtggtgaatagatcagggtaattagcatatccaccatctccggcatttatcatttcttcattttgggaacactcgatagtctcctagctactgaaaactctgtattattgttaatgatagtcatcttacagtgatgtagaacaatggaacttatccctcctctagaactgtaactctgtacttttaacaaacgtctccctactctccttcccctgccattctcagcctctagtgtcctctgctccattcacattttactggaaccctgggcagggcctggcacagccaacctctcccttctcagatcgtccttttagctcaagccttcctcctacctctcaggctgcttttctccccgcacaccacccccccgccaccggctttattattattattattattattattattattattattattgagacagagtctccctctgtcacccaggttggagtgcagtggcgtgatctcagctcactgcaacctccgcctccggggttcaagcgattctcctgcctcagcctcccaagtagctgggattataggacggcgccatcacacccggctaatttgcatatttttggtagagatggggtttcaccatgttgcccaggctggtctcgatctcctggcctcaagtgatctgtccacctcagccttgcccgccctcctcctgggtccctttaaatggcgctgggtctcaggcctcgtcctcacccctatgcttcctgcctgcccactccccaggggagctggttggtcccagaactctaaaagcaccattaccctgagggctcccaagatagtattttcccctccgacattgccttcggctccagtctcttctgtcaaacctgtggcgcaccctctgcatttccaccatgttccaggctacaccctttgatctgatccagctccgtcccctcagccccaagaatgtttccccaggctccccatctcagtaaatggcaccacctcccctacctggtcactctgaccaaggatcaagtcatccttaatttctttcctccttccacatccaacccatcatcacagcctaatggttttacctccaaactatgtcccgagccatccacttccctccaccttggaggttacaccccagtcccagcagagccgcaccctgtacctgtgccccgatggcctgcattctctcttgttttttgtggtccatatgacaccggagtgttctttaaaacttgtaactcctagtggctgggcatggtggctcacacctataatcccagcacttttggaggctgaggcaggtggatcacctgaggtcaggagttcgagaccagcttggccaacatggtgaaaccccgtctctactaagaatacaaaaattagctggccatggtggcaggcgcctgtaatcccagctactcaggaggctgaggcagaagaatcacttaaacccgggaggcggaggttgcagtgagccgagatggcgccactacactccagcctgggcaacagagcgagactccatctcaaaaaaaaaaaaaaaaaaaaaaattgtaagtcccatcctcctctcccttgcataagagcctccagtgacaaaatccaaaaccctgacttcccactgtggcctcgaaggtttcacttttgcctgaatctttgaccttgcccctcccagattcccggtgactctcactgttcagccaccctgacctgttttctgttcctcaaactgcccaagcgagttctgcacagggcctttgcctggcttccccttcacctagaacccttgtcccccaaatctttgcacagctgcccttgtgcccttcaggtttcagcacaaatgtcacctcctcagagaagccttcccccaccaccctctcaagaaactccctccccaccctgcccccatcactgccagagcaccctgcttatttccttgagtatgcaccactgttagctgcatgtttttttaatggctgtgtaatagtgatacatgtttttgggatacatgtgatatttcgataactgcatatgttgtgtaatgatcaaatcagggtaactgggatatccattacctcaaacctttgtctttgtgttgggaacattacaattcttctagctttttgaaagatacaagaaattattaactataatttccctgctgtactagcaaatactagaacttatttcttctctccaactgtatcttgtttggcacagtcttgatcatctatgtgtgtcctgtcatcccccactggcctgtaagctccgtgggtccagggctttgccagtgtcattcactgctgcacagtgcctggcatagagaggctgttggtgcagatttgttgcacaagcagatggatgaatctcagatgtggaatgttgactctttgtcagggagggatgggctcccacctaggagtctccgaggaccagctcaaaggctgtaaaaatcatgccctgcctcagtgctctgggggattagaaagggggtgcctggattctctgagactctgcagctgggctctctcgctttcctgtgcgtgtcaatcactgatcttaagaaaatgcagattctggttcacaggcctgggtctgcgttcctagcctgctcatcagcaatggtggtgctgctgacctcagatctctctagcagcgcttttgtaacttgcaggtcctgtgccatctttccccctacatgccatgggaccacgcggaaagagccagaggggtcccttcattgcctcctctgcccctcctccctccatccagcagcaagtgttatttgtagcagtcactgtcacctccgcatgtggtgaggcctgctaggtttctgtctccacatttctgttactgtgacagacaagacggattctctgccaggaactgtgctcagccacttgcttctggcattgctgtttcctctctgtgcacctcttattcaggcagactcctgggggatgttgcccctgctggaagtcaggcccagttcattgccctagtgtgggatggggcagctgaccccgcggggaactgggaggcattaccgagaggtttccaagctttggtttcaggagtacaggtataggcctacctgactggccctgggggcaaaatgttcatttaaacttggggagaggctgggcacggtggctcacgcctgtaattccaacactttgggaggccaaggtggatggattgcttgagcccaggagttggagaccagcctaagcaacatagagagaccccatatctacaaaaaaattaaaaagtagccaggcatggtggcgtgtgcctgtagtcccagctactcaggaggctgaggtgggaggatcacttgagcctaggaggttgaggctgcagtgagctattatattatcacacgactgcactccagcctgtaccatagagagagaccctacctcaaaaaaaaaaaaaaaaaaaaaaaaacaaacctggggagagtttgggacctttggagtccaagagttctgagtttgaatcctgatgctgtcacatactacttgggccacgccgaacaaggaacttagcctccctgagcctcactttcttcacttgctagatggaggttgtaactcgtgtcttcctcccagggtcgttgtcaaaatgaaacatgaaagtgcatggaagtaggaggtcaaggcaggtgaattacatgaggtcaggagttcgagaccagcctggccaacatggtgaaatgctgtctctgctaaaaatacaaaaattagctgggcgtggtggtgcatgcctgtagtcccaactactagggaggctgaggcaggagaatcacttgagctgagatcgcaccactgcactccagcctgggcacaagactcgtctcaaaaaaaaaaaaaaaaaaaaagaaagaaaagaaaagaaagtgcatggaaggctctccgcactgtggaaaatactggcatttctcaactcacaatgcatagattgtgagacatatcatggtccattgaatatcttttgactcaggggtggtgaccaggtgctgatagcaaggcctggggcccagtcctcctcccacaaccgcatcccccccagccccacccacagccacctgctgctctagcactagctagaaaagtcagcccctgggcattctcaagaattgagcccacccctttgtcagaccattctcccagggcagagactggcctgatcacatgaaaaccacacctgccgagccagagggcaaatgctccaacattgtattagagagattaaacagctgttctcaaccagatcattgctacattccatttcctgaccaggaaaatgaaaatggctgtcatagaagacagagcataaagtctgattcttttctttttgagatggagtctcgttctgtcacccaggctggagtgcagtggtgcgatctcagctcactgcaacctccgcctcctgggttcaagcgattctcctgcctcagcctcccgagtagctgggactacaggtatgtgccaccacgcccaactaatttttgtatttttaatagagatggagtttcaccatgttggccaggttgttctcgaacccatgacctcaagcaatctgcccaccttagcctcccaaagcactgggattacaggcatgagccactgtgccttgcctaagtctgattcttaagatggaaactcagtcaggcggccatggctcatgcctgtaatcccagcactttgggaggccgaggcaggtggatcgcttgaggtcaggacttcaagaccatcctggccaacatggtgaaaccccgtctctactaaaaatacaaaaattaatcaggcccggtggttcctgcctgtagtcccagctactcgggtggctgaggcaggaaaatcgcttgaacccaggaggcagaggtttcagtgagccaagattgtaccactgcactccagcctgggcaacagaacaagactccttctcaaaaaaaaagatggaaactgtctgtgggctctagggaggcagtggaggtgccaggtgaactgacgattagcaccacagtgggaacaggcaggaagaggactggtctccagtctctggtctcctgtctgaacaagtctgtaggggaggaaaaacttctcctctacccttttatgttatgtctgcagtctgcaaataaaattgagcaaagacagattaatagaaaaaaggcatacgaattttattgttgtttttaattttacatgcatgaaaagccaaagagatggtcagacccagggtttatatacaattttgacaaaggaagataagttgtgggcaagtaactaaacaaggaagagggggatttgggctcctaagggcagtatattctgggaaggtagctaggaaatgtgtgttagattgggggtggtggtttagatgtgttatacagatacataacctccccattggatttattctccttttcatgggacgggagaggggggcacatttacaaatggaaatttatgccctactttcaggcacctaaggggagggcagagagctcatcctgtgtctgctgtttctcagttgccttcagctcaaaataatccttatgccaaagtggcgtattgcagggtggcatatttggatccccttcaagttcctgcctcagtcccttccccagtcctctgccttgtacacatgggtacctcactgtacctactcaaactaggtctcctttgaccacagggagtgggtctgctctgataatgtgttgataattggttgactttacaaccaatatttcaaaacaactgccttatcgagcccagcctggggtttctgtcttgtgctgtgacttgcaacattcttggtcagaccccttctcctcaagggaaactttaatctaggctgaaggggcctctgagatgggtaccaggcaggaggcatgtcaggacccttacctgctgcagtgaatgtcagctttgccaccttcagggctgacgctcccaaggcagctgcactcaccctccgctgagagtgccatcctgggcttacaggcagaggctcagctctgacatgtgatatcggagaaagtcagtcatcttcagcatcttcaggtcatgttaaccctattcctttagattttccattatctatcctaataccaagttccgtgtcagaaagcgctgtttgctcttacctccttgcaaatacgtctttactgttgtacattttgtttttattctcacggctcattgaatattgcttcaatttcattagaattgctacaggaaaccttacagctgatttgtcatcctgtgtactctttgatccaatatattctttttttgagacagggtctcactgtcacccaggctggagtgcagtggcacaatcttggcccagccttctaggctcaagcaatcctcccacctcagcctcccaggtagctgggactacacacatgcggcaccactctcagttaacgtttgtattttttgtagagacgggctttcaccatgttgcccaggcttgtctcgaactcctgagctcaagcgatccgcccccctcagcctcccaaagtgctggaattacaggcgtgggccaccctgctggcccctagtacattctttttaggattttgtaccagaaaagaagtccttcctgatgaaatgatacctttttacatcagataacaagagttacagcataactatccccttgctgtcctttttggttttggtaagtcagaaaacttagagctaatgagactggtgaatcaataaaatctgcctttccatttaatcatttacctcctttttctctatggtttatttttatttttactactctagctatgaatgtgtcttttattgtaaataatttcatagctgtcaggaagagataaaaaggaatcttgatttactaaggagagacttattaaaggattattattgcctgggggtggtggggaggggactattccaatggaagcgggagcattgcagtgggagagagcactgaccagaagatcctcctgcacctccaaagttaagccgaaagggttgttcttttctaggcaagagtaaacaaggcttgaaagaactggtgcggggaggtaggttgaaaaggtggcctggtcctgggggcctgtcttaatgcaggccaacctgtcctccggagggctgtaaggagggatagtgagttgctcaggtgagggtggccaaagttcacagaactgggggaaagagagaaactagagtttagttaacaagcatcgtgttttaggtagagaatgggaatttggagggccttcctcacaggttctcgactgtgttctcctgggggacgaggaccagcttcatggcttgctgtgccctgcgctgggcctgaccaagttacttggtccctgtttgttcactgacgttgactgagggcctttccagagtcaggagctgacctctcacagagattccaagaactagcaggtcacactctcacctctccccaggggtccccagttccggccatgccctgtgtcctctccttctcctcaaaggggtccccaggcctaacctggggaagcactatccattccctctctcaccccaccccagtcccccctggaactggcttcctgcctgcttcttcccctttctccggggtggggcgggacaaggtggagggagagtgggaaggagaggaggagtcacccagctgcctcctaggactgataagagacccagcgggagctttgaaggctgttacagcctgggggtgggagcaggcctgacccccaccaccctcacccccagccccgcaggtggccacacccctcctgctgccctaccctctgtctctcaacttggccctttctgtgcctctgtgctctctctctttgtgtgtgtctctgtctgcatgtgtgcctccctctccgtccctgactatcctcccttcctctctctccttttcccctccccgctctgtctcttctctctatctgcaccccatctctctctgtcctgaagtctgcattctcaacacagggaaccttccagtctgacccaggtctcagcaggagccagacaaaaggccttgagggaagggacagatggagtgtccccatgctaatctcctttaaccacccccagcagaccaaccctgccaagtaggtactgtggtacccatttcgctgatgaggaagttgaggctcagacagcagttaagacgtgtgtccaaggccttggggccacagtgtgcagggccaggatttttagctgcatctgatccagttgcctcagaatgcgggctgagtccacctttcctgaggctcctcaggtgtcccaggcctctcctcactccctccaccccatccctggaggcaggaccagaggactcctttgaggagctgcatagcttgggagctgcgcatcaggagcatctgcagtgctgcaggaccatcttctacccagaggcatgaagcaaagtatcatgggagccccgcagggcattgcggggaggcaagattctcccagccccttcctgctgcttttggaggcctgaagatggctctgacctggatatagggggtcctaaaatggaagccctttggttgaagaggcaggtggcactgagcctgccagctggggctgtgccaggggtgtttggaggtgcctctcagaatgggccttctctgcacgggagcctgggagatgcatcaaggaaagatgtaccagcttcctggctgtggggcttctgggggtcttcaaaatgctcatgtgcacctctgggcctcccagcacagaggtggaggcagtttgccaatgttctttcctcttggaacccttcatgcaccagcatctttgtcacattagtgaagaatggactggccttgtgggtcacccagggtgtgaaacacgtttggggcgaagctgccacttcctccccaggagaaaacagaatgtggcccttgatagcagtgtggggtttagctggcagctgttagcccaggagctgaagacctgtggctacatgcacagtcatgtgtgtgaatctggtccctctattagccagggtcactgctacctaactccaaggggcactattatcactgtagtctatggaaattgtgcagtacccaacctgtgcagctgaacatggtagtcctgatctcaactctcactcatcatgtctgacagttgcaatggcctctctgctgactttctgcctctagtctgttccctctagtattgcctacaccccctgccccgtgtcaattccccagtcctacccacctccaagtcccttctcccctcagccacctgtcagagagatctacgagtactctcagctgttcagggatcctgggagtagactccttcctctgagatggatgagccatgtggtcttgggcaaagcacttaacctctctgagtaaccccacactggtatcacttattctcatttataaaatgggggtaaaatgcccatcaggttgtagttttcttgatcactagattcttaactccaggaggccagatactctcattcctctctgtacccacatctgacacatcctcagttccggtgagcgttttattattattattattattatttaacatgaatggtaccataaagcatttgttgaataaatgagcgcatgtcactttgaccaaaacctttctgcagcttccactcccacgcctgatgggttaactcaggacttcccaggcactgctgccctttctactcctgggcttttgcccatgctgttccctctcctagaattccctgtttcttgcagcactgtcatctttgacacagctcggctgccacccagaagcttttccagcccctccccccacccaaagcagcctctttatcccccaccagtccctccccacggccccagatacctctgcctgacagtgggttgtgccccagaggggctcctctgttgttctggacacaggggtggctgggactttaccctcctggggtcccagggcttgtgtggagcctgggactggctcaggacagaagtacacagagtgctctggaaattggtggtggccacagtgctcctgcctgccttgcggtcactcccggccctctcaggtgcctcttgaggaaaaagccctgctgccttcccagacacaagcccaccatgggctgggacagaccagactgctaaaaagcctggctggaatgggatggggtgggcacttcatggtcaggctttggggtccattgaaaaatgtgtctttgggtctggtggaggagcaagcacgttggagactcatgcctgatgctttggcttactaggctgttgtttaaaaaataaagtgcttttcaaatgcttaactcagaacctgacccaaagtaagcagtggatcagtgtctgccgtccctgggagcaggtggtgtagactcaccttagagcatggacgtcaagagtcagaaggacctgggtccgaatcacagcttggcccttccccgtgagactttggacaggttgtgtcatctctgaacgttgttttctttgcctgttaaatgggcatgaccctaatgtactcctcagtcttgttgagaggatacaggagataaattagaagccgctggcatcagttaggatgtgtgttagagcctgacagcaagacagagtgctagaaatgttggtggctataaatattactacttgcttctattttctggcaaagaaccattaatttcttggacctcttcattttctctctccctccaagactagtggtagcaggtggctttctctctgggaccattttttcacagacacaaagttgagtgggtgtatatatagagacatatatatatttcttcaagacagggtctcactctgtcacccaggctggagtgcagtggtgtgatcctagctcattgcatcctccaaatcctaggctcaagtgatcctcccaccttggcttcctgagtagctaggactgcaggtgtgcaccaccacgcccggccatgtgtgtatttttaatcgcttcacaggagttaccacacacagctagtttacagcattgtgctgtaaatgctggctgggtcatgtgtcgagccccctaccacccacagcctcccctgtccaccaactctcaccatccacagacctccagagcccccacatacaccaccatgatgccccccaaatccacagacccctactcatagcccttgctgccaacaacccccctgactcccacccttagcttcctcaccacccttatagccccacctgtctgataaaataccttgaggccatttgcagcagaggtgcaggtgtgcagatgaggcagaaaagcccctccacacgcacaagcctgggcctggccttggactcagacatcatctacgtccacatctccatccaccctacaaagccctcaccagttcctgaggtgcacagctaagaaccatcaccacgataccaggcacttactgagcacttagcttggcactgagcactgatgtaagccctggatgctcaaataaaaatgcatgggttaccttgatgcaggacttctcagagctttaatatcccagcgcccctctggatgccaaagagggagatgagagtatgcagcatttgcagacttggccagggcaacctttcttcagctctggagcatacttaggaacattctgtgtccttgacattcctagtgtggtccatggactcatgcgtgtctcatctgcaaatcacctgggatctcaaactcccaatgtcaggggatccacctgcctcggcctcccaaagtgctgggatgacaagcatgatccactgcacccagccttttttttttttttgagacaaggtcttgctctgtcacccaggctggagtgcagtggcacgatctcgactcactagagatacagaatctcactacagatacagaatcgaaacccatttctactgaatgggaatctgcattttaacaccctcggagattcattcatgtgctcattaaagtttgagacacacttttgttggtcacagggctggaccttggccagatattggaatcacctggggagctttaaaaactaatgtggctgggtgcggtggctcatgcctgtaatcccaacactttgggaggccaagatgggtggatcacctgaggtcaggagttcgagaccagcctgaccaatatgatgaaacccccatctctactaaaaatacaaaaattagctggatgtggtggcaggtgcctgctgtagtcccagctactcaggaggctaaggcaggagaattgcttgaacctgggaggcagaggttgcagtgagccgagatcgtgccaccacactccagtgtgggcaacagagcaagactccatctcaaaaaaaacaaaaaacaaaaaaaaaaacagggcctaggttctacctccaaattctgatgtaattggtctgaagtttggcttggtcattgggagtttgaaaagctccccagctgattctgatgtgtggccagcagcatagatgagtgaacattagaaagggtctggagtatccgcttggaaatttgcagggaagcatttaaagtcttggaacagccccagcgaggcacagggagaacaagggactttcccgaggtctcatagctggctggttgcaaagcctccaccagcactcagtttcctagcaccagcctcggtccggactcttagcgtcattatctccacaccatcttctattttttcttctcttttattattttattttattttttgagatggagtctcactttgtcacccaggctggagtgcagtggtgtgattttggctcactgcaacctccgcctcctgggttcaagtgattctcctgcctcagcttccaaagtagctgggattatatgtgcgtgccaccacgtctggctaatttttgtattttagtggagacggagtttcgccatgttggtcagactggtctcgaactcctgacctcaaatgatccgcccgcctcggcctcccaaagtgctggcattacaggcgtgagccaccgcgcccagcctcataccatcttcttgaaaattctccctcctgatcctgagcctcagcttcagtcctcaaacaaaagccttgattgggttctgatcatgaggccgcctctgcacttactttgctggctgctggctcagggctccagcaaacagtcccaaagccagtaaagcttaagccatcaacatgaggaggcgttaacacattgtaaccaccagagcatagtcccattatgtaaggagtcctgctgcaaggccgctcagcttaatggagaacacgagactccaggcaggcctgggtttgagccccagccctggcacttggcagctgtgctgccatcatgacccctttagcctctctgagcctcatcttccctacctgtaaactgggcacaatggtaatcccctgctacaggtggtgtgcagatcatataagataaagaagacgatgagtcccgcagtgccctggcgtgtggtgggcactagatcagagttagttggggtcgttgagggctctcaattttggcaccaacacaggaggcctggggttctcagctggccccagcatctcaagtttccacacagcaagagcacccagaacctccctccaccaggccagaggcagccagcatgtgcctttctcttctcctcagctcactgcaacctccgtctcccaggctcaagcgaatctcctgcctcagcctcccgagtagctgggattacaggcacctgccaccacacctggctaattttttgtatttttagtagagacggggtttcaccatgttggccaggctggtctcgacctcctgacctcaggtgatcgctcgcctaggcctcccaaagtgttgggattacaggtgtgagccactgcgcctggacttttttttttttttttttttttttttttgagacagagtctttctctgttgtccaggctggagtgcagtgacccgatctcagctcattgcaacctcagcctcctggttcaagctattctcatgcctctgcctaatgagtagctgggactacaggtgcatgccaccacactcagctaattttttgtatttttagtagaggcagggttttgccatgttggccaggctggtcttgaactcccaacctcaggtcatccgcccaccccattctcccaaagtgctaggattataggcgtgagccgccgggcccagcctcttctccccatttgtttctcctgtgccagacccgcaggttcaaggatcatacttgcctgtgtttgaacatggctatgaggagacctgtgctgtcagtgtgggggacccccccagctttctcaggctgatcaagcagaagttggccatgccggccaacagttggtggcattcttcccatctcgtgggcccactcatgacagagcagctgttactgtcatggttattttatttttattcctccctctgggagcccagaatcaaagggaaacatcagcactgctgcctcattacagagagcagagaaaatggggatggggatgggacattatctctttttttcttttttctttctttgagacggaatttcgctcttgttgcccaggcgggactgcagtgtcatggtctctgctcactgcaacctccacctcccaggttcaagcgattctcctgcctcagcctcccaagtagctgggattacaggcgcccaccaccacacccagctaattttgtatttttagtagaaacgaggtttcaccatgttggtcaggctggtctcaaactcccgatgtcaggggatccacctgcctcggcctcccaaagtgctgggattacaggcatgagccactgtgcccggctttttttttttttttttttttttttttttgagacaaggtctttctctgtcacccaggctggagtgcagtggcacgatcttggcttactataacctccgcctcccaggctcaggcaatagtcccacctcagccttcctagtagcaggaactacaggcacgtaccatcatgcctggctgatttttgtatttttagtagagacagtttcgccatgttgcccaggctggtctcgaactcctgggctcaagtgatctgcctgccttggcctcccaaagtgctgggattacaggtgtgagctacagtgcctggcctggatattctcatccagggcctacgggcagtcagtggagactatctggggtgacatattcatcttacagatggggaaacaggttgcacagagcctggaacttcccaaggctatgttgaggccagactagaacctggttctccaggctccaggtctgaggtctttcccctgtagtcaggaaggaatctaggttaggactccaaagtcctcctcaaccagtgtgtccatgttaaatgcagattcctaggccccattgactagcccaggatgtgggtggacctgggaatctgcatccttagcacgctcccctaaccaaagttctagaatgactgctgtgacctctttccattggccccagagctccaggcctatgctccgggactctgtgcttcaatcccacattacaactcaccattcaagaactgcagcccctcaatacggatggcaccctgttaaaaaaaaaaaaaaaaagaaccccagcccctgctgggcgcagtggtgctcctgtagtcccagctaatggggaggcaggaggatcgctagagcccaggagctctgggctgtgatgctctatgttgatcgggtatctacactgagtttggcatcaatatggtgacctcctgggagcaggggaccacagtgttgcctgaggaggggtgaacaagcccaggtcaaaaacagagcaggtcaaaactcccgtgttgatcagtggtgggatcgcgcctaccagtggccactgcactctagcctgggtaacatcatagcaagaccctgtctttaaaaaataaaaaaaagagccaggtgcggtggctcatgcctgtaatcccagcactttgggaggccgaggcgggcggatcacaagatcaggagatcgagaccatcctggctaacatggtgaaaccccatctctgctaaaaattaaaaaaaaaaaaaaaatcagccgggtgtggtagcacgcgcctgtaagtcccagctactcgggagggcgagacaggagaatcgcttgaacccgggaggcggaggttgcagtgagccgagatcacgccactgcactccagcttgggtgacagagtgagactcggtctcagaaaataaaaaaagaatcccagcccctgactaatctacttcatttacagcattgcttatctggtgcacttgaggacagtgggtcccaggggaaggaggcagagacagtgtcatgttgtggttaaggacatacaccctggacccaggcagcccgggattgattcctgaatccgccacttctagtcctgtgaccttaatgtgtttcttcccctgtcggtgcctttgtttcctttcctgtaggtggtgatgccttcctcctaaggtgttatgaggattaaatgaattagtaaaaagtacttaggttagtgtctatcgcatagttatgtgctaagtgttagcagctgttacaccattttacaggctgagaatgttatgcagagagatgctgagactttgccgaggttatgcagactctgagtagcaaagttggttggggcttctacactcgtcccacatagttcctgcctgggcgtctaccgccttccagtgccaaccgtggctccgctggtagattatagcttggcagaaaaagaccctctgcactcccccattcactcatgtaccttcctacacactctggggttggggtaatttccccagtcccagtagccaggaaggcagagtctatggaaaccaggtggccatacagagcaaagttgagcttcccttagccctcagagtccctaatggggacccagggatgctaccaccttgagtctcaaaagctcaagctttattatgtcaattcttatttatactcaaagcttatttccatttttctggacaaatttacacttcaaatctctgcattttggtttaaaggaatgttctcaaacattggctctcctggctcttggtgtcaacaagaccacttccttccctgtctggagaagaaaatggagttaaggcccagtgtccttaaaccatacctcctgcatctagctcctgagtatttctttcttttcttttcttttcttttctttttttgagatggagtcttgctctgtcgcccaggctggagtgcagtggcatgatgtcggttcactgcaacctccacttcccaggttcaagcattctcctgcctcagcctcctgagtagctgggactacaggcgcatgccaccacacccagctaatttttgtatttttagtagagactaaaatgggggtttcaccaagttggccaggctggtctcgaatgcctgacctcaggtgatctgcccgcctctgcctcccaaagtgctgagaatacaggcgtgagccacggtgcctagccacttcctagtatttccagaaaaaaacagaaagcagtctcttcttggtactccccttcttcatcctgccctcagtctttctctctgacttaattctcttctctgagtggttctgatgctaagtttggcccagggacatgacagaagtctacatccccactgatctcagcctcagaatgggctttgtgagcacattctgaaactctccacctggggagagagtagtcccagctactctctctgctctgaggactgagggactgagtgaggccattcaagcctgtggagggcccaggcacacactgccccactcctgccacccaccgctctccatctcagtgcccaagggagggcagctccattaccgctcttttcctcttctcccatccctgctgtgatagaatctgccccgagcttggggcccattctaattaaggtaactgaatgcccaggcagctgaaaccggccttttgcaaaatagcaagtggaaggcctgcccttgaggcccagcctgccagctcctgtttgcccttgcctggtgttcgagatgactgggccctgcagccccagtgaaggaggggcctgggaaggggaaggggacagagagcaggtttattcggggtgagctgcgctggtccattgtagtttgcactcagtgcttccaggagctggaaaggcaaacaatagatttgggtcacgaggggttgggggaggagatggtcagatttagcaggattctgatgccaagtagctggtgcttagggctctgggctgtgaacttgggactcttctgatcagagcctctgtctcccttcctcgcttcgtctcccttcctcgcttcctctgctcagacccccacacacatgcaaagctggcctcaggcagacacatgccaccactgttctgggctcctttccttagatttgagaggcctggggcagagtggagagggctttggtcctgcatccaaatcctggctctgaatgtccttgcgcaggttatttaatctttctgtgcctcagccttctcatatgcgaaatgggaagagcaatgcattctctggtggatctgggttgtgtggggcctgaagctcttaccacatgtagagccctttttaaggtaaagaatttctggctgggcactgtgtctcatgcctgtaatcccagcactttgggaggccgaggcaggcggaccacaaggtcaagagattgagaccatcctggccaacatggtgaaaccccatctctactaaaagtacaaaaaattagctgggtgtggtggtgggcacctgtaatcccagctactcaggaggctgaggcaggagaatcgcttgaacccaggaggcggaggttgcagtgagccaagatcgcaccactgcactccagcctcgtgacagagcaagactctgtctcaaaaaaaaaaaggaatctcaacatcttgtgcaaagtttacaaacacttaaccatgtgaacacactggcagggcccctctggagcacgtgagggtcctagaagcttaagctctgttagcttcacagtaaatccagatgtatacatgcctacctgataggactgtgagggattaaatgagctcatatttgagctcctagaacagtgtctggcacagaataagcccctcgtaagtattggctttcattcttattgccctcagggttcctgtgagcattagacatttgcagattgcccaagtaacatcaaacgtggtgtgggcagatgctgtgcacctgacacatgcattcattagctcatctaatatgtagcgttcacgatgggccaggggctgttctgagcactggggaaccaatggcccctcttaaagctttcggtctgggaggggtaattgggcagttactcacacacataggcaggtccaaatggaatgaggacaggtgctatgagaaaacaaggcaaggccaggcacggtggcccatgcctacaatcccagcactttgggaggaggatcacttgagcccaggagtttgagactagcctgtgcaacataatgagatcttgtctccacaaaaataaattttaaaaaaaatgagctaggcatggtggtgtgtgcctgtagtcccagctactcaggaggctgaggcaggaggatcacttgagctgaggaggttgaagctgcagtgaaccatgatcatgccatgccattgtactccagcctgggtgacaaagtgagaccctctctcaaaaaaaaaaaaaaaaaaagcgagactatatctaggagaaagaaaagattttgatttggggcataaggaaaggcctctttgagacattacgaaagagtagggaagaattcttattctcatttctggtttgcttgcagtttctgcatgtctatccgtaaggcaatctggcatggtgacattaattaaagcaactaaaccgtttggcggtccaactaaaatctaagcaaatattgtctcctctgagcctctcaacaactctgagatgagtaagcggagacccaggcaagagtggctttacctgagctgacataaatactaaatgaaggagctggaattgaaatctccacctgactgcctcacaggtccttccttcacaccatgtgcctgacacagagcaggggtgcccctgcagactcatgtgacctcatgaccttctcagaggccacacagtctaatctcctcccctctcactgtgggaacagaggaagccgagggcctgagagtcgctgcttctgagacccatcccacatcctctgcctgccactatcaaagtggttgtgacctccctggggtagcagagtccaagaacagtcagtctcccagacacaggaagccctcctgtggtcctcaggcacctgcaccatgggtatgcagatctggccctcattgatgcaaacaccagccctctcctggctttctgctctaccccctggcacatttcttcctggaagggtgattgatgctctgctacttgtggccttggaggtgctcacagtgagagacatgagatgccttaaaaccatgaaggtcagagttcaaaaggcaagtaggcaagcagggagagcccaagtattgggcccacagaactacagtagggaagcaggcttatatctgagcatccccacaggcctggcagaagcaggaatggatgatacatggctctcatgatccaatggagggaagcaggtgcttaacacatgggctgggtgtggcaccatggggatgagtgctgcctaagcacctaccatgtgccacccactctgctaggtgcatgaagccagttactgagtgggcctcttaactgtcctgtgtggtaggtacgtttatccctatttcacagatgtgagcactgaggctcagagaggcaagtgaacattgtctcctctgtaatgaccgtcccctataaactcctggcaggagggccttgccagctgagtcatggcactcatcataaaggcttcaaggaggaggggagtcattatagaggagacaatgggccacatagtagatgcagttttctgtagaagttttattttaaaaatcaatgttattgtttttaaatacagaaacttttgatatttccattagccctggttaaaagctgaaggaaatgttttaaaatcatatgtcataaaagtatgtctgggaaatggaaggttttttttttttttgagatagggtttcactgccacccaggctggagtgcaggggtgcgatcatggctcactgcagccttggcctcctgacctcaaacgatccttccaccccaacctcctgtgtacctgggaccacaggcacacaccaccatgcccagctaattttttttttttttttgtagagataagatcttactgtgttgtcaaggctggtctcaaactcatggcctcaggtgatcctcctgcctcagccttctaaagtgctgggattacagacgtgagccactgcgcccagctggaaatgggagttttttaagtgtccaggattataatatttggtcacatatcagtgccggagcactcatagaaatgcacacatactgaggtcacaggaactaactgctttagacatgttaccccagccaagcccccaacaacctcgtgagagagatactattcctatccccatttcacagataacaggctcagctgtcaagcaggtcacccagctgggaagtggcggagcccagctgcaaagtcagggctgctgaaggggagagaggtggccgtgtgcccagctgtgagcaggctagaggtgctgggggacagtctgggtgtgcacagaagcagctcccgagctctcggtgctaatgtgaggatgaaaggcccccaccctgctgctgcccagtgggagagcctgacgctcaagttggcgatgagccttgcaggctgggcctggatgtgtgtctgaaacagggagccttttcaggtggggaggcgccctggctgaagccctcaaatgcagagtcacggggccgggcgcagtggctcacgcctgtaatcccagcactttgggaggcagaggtgggtggatcacaaggtcaagagattgagaccatcccggccaacatagtgaaaccccatctctactaaaaatacaaaaaattagccgggcgtggtggcgagtgcctgtaatcccagctactcggaaggctgaggcaggagaatagcttgaacccgggaggcggaggttgcagtgagctgagatcgtgccattgcactccagcctgggcaaaaagagcaaaagtctgtctcaaaaaaaaaaaaaaatgcagagtcacagaacaggaaaggggctgcccacctgaggtcaggtccccagaccttggctgagcaccgccctgggctcataaagaaccactgtgcagtgccgcgtgatgagtgctccccccatacccagcgcagggaacctggggagagagtggctggttctgccctgggggtcggggccagccgcagggagctggcagccaagctgggccttacgcgctgagtcatggctctcatcataaaggcttcattcagagacacggccacaggcggccccagcgctcaccatccctggtcctcacaaccggcccaggatgaatcccagccgcacaccagggatacacctgcgcacaggaagacatggtcccttctctcaaagaattgcggtctgaggggagaagcaagaccatgaacacggaaataagtcagtagcgcccatgctgatagagaaagtgcatcaagaaggcgaagcagaagggaagacagggatggccatggtgggggtttttctctaggaagagggcctcatgcaggaggtgacgtgagccgagccagacagaagtgagggatggaggccaggcatggtggttcatgcccgtaatcccagtactttgggaggctgaggagggtggatctcttgaggtcaggagttcgagaccagcctggccaacatggtgaaaccccatctctactaaaaatacgaaaattagctgggcgtggtggcaggcacctgtagacccagctactcaggaggctgaggcaggagaatcgcttgaacctgggaggtggaggttgcagtgagccgagattatgccactacactccagcctgagcaacagagcaagactcgtctcaaaaaaacaaaaaagaaaaaagaagtgagggatggaggcacgtgaggtgggggagtgggaaagagcttggctgtttggtggctgagtgatgggaaggtggaatggaatggaaggaggacccgggcagaggttctgagagcacaagcaaggagtctgcacaagaggccaggcaagggcttttagctgggaaatgacaagacctgcctgatgttttaaaaatatccctggccagtcacagtggctcacgcttataatcccagcactttgggaggctgaggcaggtggattgcttgaggccaggagttcaagaccagcctggacaacaaagcaagacccagtctctaccaaaaaaaaaaaaaaaattagctgggcatggtggcatgttcctgtagtcctagctactcggaggctgagatgggagcatcactgcagcccaggtgttagaggctgcatgagctgagatcacgccactgcgcttcagcctgggcgacagagtgagactctgtctcaaaaaagagcccctgcagcacctggaggaagacagcactggaatcgggaagagttaggtggttgcatttgtccagggaaaagaaggtgagaaggaggcggtcagctcggccaggctgccaggactgctgatgtaggtggaggaaagagccatccagggctattccatggtcctcacctgagctcctgcatggaggttggtgcgatttgctcagcgggcatggagggaaacttgacatttgggtggtaagcatgttaatttgagctgcccactggatagtcagttgaagtcgtctgcacactgtggtatgcatccacatccccttgaggtccaaggccacctgccagaagtgttggctgctgcagaccgtccccaggagccaaaggggctgccttgcccaagatgacagacccatcctggggcagccctcatctgaaggctggtccaggtggggacacaatgattttgcccccttgcctctttctgggcaactttgaaggactatcttggctccagatgccccggggatcagctgaggctcattgcagctgcaatgcaatccacttctccctctgcccatcctgcatcccttgtgccctcacaggccaagccctaagacattccccagtcaacttcctcacaggcaattggatgcatttagttcggagctccaggaagaggtctaggctgggtggcaacaatgtggggtggggacatcagcactggtggaatttaaagtctcaggctaggtgagaagggaagaggattgaagcacagagcatgccaaccttgagagctgaggaggttggaggggtggtgccctggaaccaagctaagaaaggtttaaagggaccaggtgcggtggctcacacctgtaatcccagcactttgggaggccgaggagggtggatcacttaaggtcaggagtttgagaccagcctggccaatatgatgaaacccatctctactgaaaatacacaagttagccaggtgtggtggtgcatgcctgtagttccagctactcggggctgaggcaggagattcacttgaacctgggagacagaggcttcagtaagctgagattgcgccactgcactccagcctgggggacagagctagactccatctcaaaaaaaaaaaaaaaagagagaaagtgtttaaaggagagatccggtgcctgtaatcccatctacttgggaggctaaggcaggagaatagcttgaacccgggaggtggaggttgcagtgagccaagattgcaccactgcactctagcctgggcacgacagagcgaaacactgtctcaaaaaacaaaacaaaacaaaacaaaacaaaacaaaaaacaaaaaaaaaacagagattcacctcaccaggtgctatgaggattgttaaggtaagatgaggacccgtgacactctagttagttcatttcaaccgctgtggtgttcagggaggaacttgaaggaacgtttaaagccaggggcataatgtggtgaggagaggaactcatagagaaggagaaatggatgattcagaaggggagggcaggagcaaaaccttgaaggggatggggtccagggcccacatggaagggtccatctgtgaataatgctttgtatcaagaagaaggcagagtagaggcacctgtgcaggttggtgtgtagagctggtggggaggtcactgggcatggtcactggctgtgagtgagtggtgggaagcagtgctggagatgagaagacaagaagagaggagagtcagcttaacctgcaagtctcccagctgcaaagggcactggtgcgcttcaaacctgactctgggcttcattcactggaaaaagcacaaagaaagacattctaagctgtcaagacgtggtaggttcagcaaataatactagttacagtaaaaagatgtgagctgttgctacgcttaagcattcgtcgtgcattctttcatttaacaagccatccctcaaaacccctgtgacacagatacagttggtccttattacttgcacattctgtatttgcaaatttgcctgcttgctgaaattcatttgtaacaccaaaatcaatactcgcagagcctttgtgatcatttgcaaacattctcacggtggtgaagatgtgagttgcccaacgtgcatgttcccagctgaggtcaaacaaggcgacaagcggccttcttgtttcagctctcatactgtaaacaagtgtcctcttcacggtctagttagtgccacgttttctgcatttttgtgtggttttttttttttttggcgattttgctatttgaaatggcccccaaaggctgtctagtgttcctaaatgcaagaaggctgggacgtgccttgtggagaaaataacgactgagtgttagataagctttgcccaggcatgagctacagtgagttcaatgttaatgaatcaacaatatgtattaaatatagtgtctttaaacagagacatgcttaaaacaaggttatgcattgatcgtttgatgaaaatgttgtgatcagaggctcacaggaattgaaccagtatttcccctaggggcaatggttcagtattcacgattctgtgtttgtagtgacttcatagagcataactactgcaaataatgagaatcgactgaacttttttttttttttttttttttttttttttgatacggtgtcctcctctgtcacccaggctggagtgcagtggtgcaatcttggctcactgcaatgtctgcctcctgggttcaagtgattctcctgcctcagcctcccaagtagctgggattacaggcacgtgccatcacgcccagctaatgtttgtatttttagtagagacgggatttcaccatgttggccaggctggtctcaaactcctaacctcaagggatccacccacctcgggctcccaaagtgctgggattataggtgtgagccaccgtgcctggcctcgtgtgtactattaactctgttggtcacataagaaaccaaggctaagagactagacgagctacaggtagtaatagcagagctggggctgaaacctgggctggtggggcactagggggcttcaccccatgaatgtggccttgtgatccagtggggaccacaggggacctggcctggaagaaaggtttcttttttagggcaccccatgagcagcctgcctccccactgcactggcctctccagtttctacgtgaacacagaagctccttcagccctcctgggctgcagccacagagctgttgctgggccgtggttttcccctaagtgggtggaacagtggctccgtgtccagaggccgggcacctttggttttcctttgcccagcccagccctggcaggggaggcacaaaggaggcatctgtgactgagcacggaggccagccagtctcccgacaccagcccatccggtctgctgtggcctcctgtttattcaggggataaacttgggcaggccccagggagccgccctctccccagccccaccaccttctccacagggcagagtctgcagcccttcttctgtcttttgtggggtagcttgcgtgttgtggtttgggatacttcttcatcccagcatcactgagataatttaggagacaattgcgggggactctgctttcagagtggagttacaagcccttcagtgtgtgtccttccaaccccagaacagactcagagtcgtcatcgtccactgtcatcccgcctctcaggaggccgctaaatctgagactaatggctgccacctggagtgttcctcaggcagggagcaaccacacgactgtgaggagggggcacttacctggtggggggctcagtgctcccctgtggggctgaggaaggagcctgggcttggggagaagctgggtgctccccgcccaccctccttgacccatcagatatagatgagaagccacggctgggagggtgcgaagctgacagcagagccccaggtccccagacaagctgtggggagaagagcagcgcgggcgtcagaggcgcctggacaggcagccggcaggtccacagcaaggctgcaccttgttcttccttggtctctgggtggccagcactaggtctggcctgcggtttctgctcagtgattcttgtttgagtaaatgaatgacggggtgaatgaatgaatggtcttggttctatgatggttactttggggaagttattttattatacaaaaccgagcctctcttttttacataggataacggctaggtgcacagtctctggagccaggctgcctgggtttgactcctggctctcaacttactagctgtatgtccttgagtaacctctctgagcctcagtttccccatctgtaaaatggggataatacctgcctcgtagggttgtcgggaggattaaatgagctcatatcatgtgaagcactagaacggagcttgtatatattaagtgctatgtggccatttgctgttaatacttttttttttttttttttgagacagagtctctgtcacccaggctggagtgcagtggctagatctcggctcactgcaacctccacctcctgggttcaagcgattcccctgcctcagcttcctgagtagctgggattataggcgaccaccaccacacctggctaatttttgtatttttagtagagacggggtttcactatgttggccaggctggtctcgaactcttgacctcaaatgattcacccgccttggtctcccaaagtgctgggattacaggcatgagccaccgtgcctggccagctgtaaatacctttaagatgaacataacgtctgccttccgcgcgtgttgggagcctggtgcattgtttgcccaggtgtgctcttctcagaacactgatcccttgtgttgttaaatgttaaataagaagggtcctgtccaagcccagttgccttaaggaagcctggggttaaaagctagggaggcttctctcctgcagaggtgcctgtgacatcttcaagagggagtgaagaatttcaccggctgatttgaccacagatcaatttcttgctatcagagtgggatggggtttccacaaaacacgtctttgaagacaacaaatactgcttccttccctccctccctggagccctggcctcatactgcttagcttatctggtagcagccagggaaatggcaggatgcatctccctgggcttagaactggggcaggaggcagcagccaagtcaacagcaggtagtggccagtcctcagctctaagccagcaggtaggactgcagaggtgcatgtggcaaatcatagacacctgatgtgggctgccactgactgagacactgctgagctggacagcagacacctgcaacccaaggatgatgaagaggaacttgaggcctttaattgctcatggtcttcaatcatccttaccaattagtttctgctgcttcccaggcaattccggttgctgtaagtaagccagtgatgcaacaagagaggcagaagggagtcctgaacgtgggccagatctgggtacaaatcttgtctctgccaccacttaatcctcttgagcctcagtttccttatttgtttcatgagtgcagtaacatctactctacaagattgttggattaaattaagaaatgaagtggctggcacatagtacatagctgttatcaacaataggctgcagggaaatgttctctccttggtttcagggcccttgtccaaggttcccattaggtagaggaattgtttcttcagagttgagatctgatgtgtctgggaagagggcagcctgacttgagaaggtctctcacctttcaaatgcccatctcaggaacttcagaaaaggcttccgctaattcaaaaatcaagtcctcagctttccattgtctgtgggtgagggattctcagtcccattcagggccctaaccattccccaggtgattactgtgtgccagacatgttaggagcttaagtccaaagacaccaggggcatggaccctgtcctcaggaattgcagaatggtaggggacctgacaggaggccaatcctgacaattcagtgtgttcctcttagtaacacagcttgtgattgaggcatagacatcatgaagccaaggaataatttattatcactggagaagacagggaaggcatcacctgggaaatcatacctgggtggagttttgaaggatgaataggagtttgcctggtggacagaggaggccaaaagtttggtactaaaaacagcatacctactctactcccaaccacctcccttttctaggattggtgtgggtccatctgccgttagcaagctttgtgactataggtaagtcatttcttctctctcggcctgtttcccattggtgaaatgggatcccttccagctttaatgcattgtgatttcatgtttatataggcctagataattgttttaaagtcctcatatttgcaaaacacggggcaaaagtctttgactttttctcttctaacgcatctcccagtcttacaaagttggttgtactctctccatttgactgaggaggaaactgaggctcggtgaagttacttgcctttagccaatatgtggcagatccaggcctcaaatccaggtcttctggccctgagttccactgtttctccactgctccacacggcctctcaccccacaagccctcggcggctgcacataaatgatccttgacagattactgcctcactcaggcccctgtcagatgttactgctgacagttggggaggaggaggagcgagaacattgtgtgccaggatgccaggcctcggccctgaaggaggagcttatgagaaagaggcaagcagggaggcagcaggtaggacattgagcatggtcaagaaaggctgttttggccagagagtggataaatgataaagtctggagtagcaggcaagtgcacagccaccctttcctgaagcaaaaattggtgcctaaatccatagtgaaaatagtccccctggccgggtgcggtggctcacgcctgtaatcccaccactttgaggccgaggtgggtggatcgctttaggtcaggagatcgagaccaccctggccaacatggtgaaaccctctctctactaaaaataaaaaaattagctgggtgtggtggcacgtgcctgtgatcccagctactcgggaggctgaggcacgagtatcgcttgaacccaggaggcagaggttgcagtgagccgagatcacgccactgcactccagcctggcgacagagccagactccagactccgtctcaaaaaaaaaaaaaaaaaaaaaaagaaagaaaatagtctccctgcctccagggtctctctatgcccataccctgctttgtttttcttcagagcacatattatatatgtcactcattaatttattgtttcatcatctgacttctcccactaaaatgtcagctccacaagaatcaaccaagacttggtactgatcaaggctgtgtctacaacacctagaacagagcctggcactaactgttttgaacaaatgaaggaattaatgaaggaatgactgaaagaatgaaggaatgaatgaaagaatgaaggaatgaattaaagaatgaatgaaggaatcaaagaacaaacgatcccttcacctgtgatcatgtcagcacccactgttgtcagcaagcctttagcaaagcagttcccaaactgctgcatcagaatcactgggatctttaaaaactgccaacacctggcttccaccgtgacattcggattaggttgccatggggtatgttattgacatttttttaggttcaagtgattccaagcgttttttaagttcttcaagtgatcctgatgtgcggtgcagtttaggaaccactgctttaaagggttgtccactcctgaaaaagggcagtccactcctacaaagcttctagctgagttaatagccaatcagagacatgggtagtggcacgcagggtgggacctctgtgctgcccaagtctgggaggaggtggggagggtgaggtgtttggggaaaggagagttgtttttgctgcctgggttttgctgtctgggtaactctgatgttaccaagagtagaggaaaacgaagtttttctccttgctctcacccaattcaagtcaaaagaacaccttgctggacttcctcctcccctgccacctcctcttcttggatgactgaatgagtcagggggcttgtttgttagggaggaaacactggttttctcaccattttccccctttcgttgagcttgaatgagtaagaaaacccattgtttatacatgcacaggttgacacaaatagagcttggagcttctgaagactcaacctgggctccagagtcaataagaccaggtcccaccccgtctgcacagcatccagccagatgttacaagagaacccagccccgggggcaggctggtgaaatcatcccggccagtggacagtcaccaacaccggagtgtttgccaagggaaacaccttgtttccacagtccaagatcctctcctgggctggcacagagttgcagaattggaagagacctaaagatgtgctgtccagctaaaagctcttccaggggaggagtctgaggcccaaaaagttagggagagcccagaacccaggcctcctgcatcttcactgggtttggtgggaagaggcagaggaaggagtggtcagagaagatgccagcttagtgcagacccctagacacatccccactggcgagagagggcttttggatccaagagtcattcccattttttttctaaataaaaaattgggggccaggtgcggtggctcacgcctgtaatcccagcactttgggaggccgaggcaggcagatcacttgaggccagttcaagactagcctggccaacatagcaaaaccccatctctactaaaaatacaaaaagttagctaagtgtggtggcatatgcctgtaatctcagttactcaggaggcggaggcacaagaatcacctgaacccaggagacagaggttgcagtgagcaaagatcgcaccactgcactccagcttgggcgacagagggagactctaaaagaaaaaaaaagaaaaaaaaaagaaaagaaaaaaaattaggaatgactttcctttggggtcaagaggcctctgcagtctcagagtcctgcctatttgcttggtagtcccttccctaagccactgcttaagtcatcaaatactgaatttaccacctgggatgaaagctgagatttaagagttgtagctgaacttcctgagcgtggagtcaatggacctctgagagagaggtgagagaggacaagtacttgtggtaaagtcctagccagctgccaggggggcttttccacacatagagccccagctgggcagaaataatgtcctctggccgggggcagtggctcacacccataatcccagcactttgggaggccgaggcgggcggatcacgggatcaggagttcgaggctatcctgaccaacatggtgaaaccccgtctctactaaaaatacaaaaattagccaggcgtggtgtcatgcgcctatagtcccagctactcaggaggctgaggcaggagaatcgcttgaaccctggaggcggagtttgcagtgagccgagatcatgccattgcattccagcccgggtgacagagtgagactgcatctcaaaaaaaaaaaaaaaaaaaaaaaaaaaagtaaagaaagaatgtcctctgtgtgtgcgttgacagaatcaagccctgctaagatggaccaggtttgactgatgctcacagtcctgattaatgactggtgtccaccttggagagcactagactgagagtaatgcaacctggctctactcctggctccaccactaactgagtgtgctacttgtgaggggagatgccatttcccacctctggggctcattcccctgtctgggaaatggttatactataccagtgattttaaatatttttaaagccatagaaccctttattcacatgaagtttcatacagaagacagcatgtacagcagacagaagtggagctatttttgtggttcccctggagcacatcttcccttttgcgaagtctccacagaaccctgagggttccaacaaactcagtttgagaacaacttgccagactttttgttttagctccaatactatttatgtcagctgttgtttgttcacttggctaatattggttggcatcagttgcttggctaatgttaacattaggtaatgttcagaagggttcttttctcaaaataatgatcatgaaaccatatatatatatatttagccagtcgttccacatggccccaaacatgtgcagaatgttgcttctttacaccatccaatgttgagctaactcttgcatggtggcagcgaaagaaaatagacacagagaggccaggcatggtggctcatgcctgtaatcccagcattttgggaagctgaggtggggggattgcttgagcccaggagtttgaggctacagtgagctatgattgtgccacggcacttcagcctaggcaacagagcaagatcttatctttttttttttttttttttgagacagtcttcctctgtcacctaggctggagtgcagtggcacaatcttggctcactgcaacctccacctctcaggttcaagtgattctcctgcctcagcctccagagtgtctgggattacaagcgctcgccactacacccagctaatttttgtatttttagcagagacagggtttcgtcacgttggccaggctggtctcgaattcctgacctcaggtgatctgcccgcctcggcctcccaaagtgctgggattacaggagtgagccactgcgccgggcctgacattgtctctttaaaaaaaaaaaggaacctcacaggtaatgctaagagaccagggtacctaactcaagaccttccttccccacatcctcataggtggtgctatgctcagaaggcaggattatatttcctattaactcactcttagcccccgtttgaaccaaggacactgaatcctagcctgtgttagagccctcagatcccatattcatcctgtgtctaatctcacccatcagatacagtcaccatccccaccccaccccccactggactatcattgcttctctgaaccctgctggaaagtgttagcccttccctcaaaagtcagggtcctaaattttccctcaggctgcctctaatcctcacctctgttcccctcagcctcttgccataatgatcattagtaatagctactgtttattggttacctgctctgtgccaggctctgttctatgtattttactggtcctgattattttgatcctcacaatagttctaaaatacatactattattatctccaatttaaagatgaggaaattgagacactgggacttaaacttgcctacgttcatttagcaacaaggtggtaaagccaagatatggcccttggccccggcacccatgcacagaaccagtgcgtcagactgcagctcactcatgctgctggtagtgactaggaactgccatttattgagcacctgcagcatcttaggcattgcactagacactttatcatttcattgaaacttcacaactgcaagaggaaatgtcttatttccattttctagaggtagagactgaggctccaaaacattgacttcccttgataagtggaaccgggcaggcttcaaacccaggagtgttcaatgcatctgtggcctttctctgtcactctgcttttaaggacaagtacctgcagacattccccactccactacctttgagaaaaataaagaaggacctactgataccacccgttccatagagctcttgagaaatgtcgctcaggctgcccatggtggggacagggagggggcttgacaggcctgactttctccattgaccttctctgggagagagtcacgaccagagaagggatgatcacccttggtttctgcttttctttcttggttctggacgatcctgtcatgtgacctgctttgagcctaataatccttaggggcaacatcggacttggaagggaagaagggaaaccaagatagaacccctggactcagccacatcctaaaaccttttgggacactgctgagcttaaggtctcagggtggagatgggaaggcagatagagtgggcccagggtgcatgggctcaatcgcataccacacctttgaggagtgcctaaaattaagtgtagtcactgtgctagggtgtacaacatcctgtgaggtaccattcccatcttacagatgaagacattgagtcttagagaagtaacagaacttgtcccaagacatctgggaaataagactcaattcaaacccaagtctgtttgatttcaaagccagtggtatgatacaccacataggtactcttattttttttttaaatagagacagggtcagccaggcgcagtggctcacgcctgtaatcctagcactttgggaggccaaggcgggcagatcatgaggttaggagttcaagaccagcctggccaatatggtgaaaccccgtctctactaaaaatacaaaaattagctgggcgtggtggcacacaccagtagtctcagctacttgggaggctgaggcagaagaatcgcttgaacccaggaggcggaggttgcagtgagccaagctcacgccactgcactccagcctgggcaacagaatgaaatataaatctcaaaataaataaataaataaacaaatagagacagggtcttgctgtcaaccaggctggagtgcagtggtgccatcatggctcactgcagcctcaaactcctgggctcaagtgatcctcttcagcctcccaagtagctgggactacaggtacgtgccaccacacctgcctaatgtttttatttctaattttttggtagggatggggtcttgctgtgttgtccaatctggcctcaaataccttgctgtgttgtccaagctggcctcaaatacctagccacaagtaaccctcctgctttggcctctcataggcactgggattacaggcatgagccgccacatccaaccaacatgtgtgttctatatgatacaccacagtgctcctgtgtgttagagactgtgggagcggacccaaacaagagaaacagtctggcctctgcacatatatctctgaacagcaaggcatactttccgaggagagggctggggcagtggagtttctcttggggccacagctctagctcctctcttaggtggctctggccaggaggccctcctgtacctaatgctgtcccatttggaaagtccccagcagttctgggagctccagcggctgctttgcctcagagacaagccctggtaaacataggggccgctgcgaatttactggcaggagagactgagaaggaagttgacagccaagaggcagagaagtgggcaaagctggtgcgtgtgtgcatgtgtgtgtgtgcatgtgtgggtgtgggtgggtgtgtagggtggtgcaggaccaaagcacccagatgccccactggtcctgcccgtaccaaagtgccgttgccactttgttggccagtgaagactcagggaaggcaaaggtggctttgagccagacaggaagataaatctctcccctcactcaagttatatagtgcaacagcaggtcaaagggcaaccacatttgcaatatttgccgctttacattcatctcatttttgtctttttaaagtccagggcatggttaagagtgatggggggatggggagtacatttttaaacatttaattttttgtagagacgagatgtcgctatgttgcccaggctggtctcaaactcctggcctcaaagatcctccgcctcggccactttgtctgagccactgtgcccggcctgaggacacatgtttgacataaatagtatttactagcattcaacaggaagggtcctctcctttttttttttggttctttagttctcgttgccgcttggttctttgtgttcctgggctggttatggagatggttccgacttcacatgaaaaggctggaaaagttgtgggtaggactctggatgaaagtcagcctaggcgcccccggactcattagggggtggaggcggcggcggaccgtgtggggcggggtgcgcagtgtgagccggggagcgccggccggaatctcacagtgcggtgacaaaaaaccgtgagggtggcgcagaacgggcaagagactacagcgcctacctggcaggggcgcgagctcacacgccgactcctggagtcccagccagggctgccctgagctgggcgcgcccaggcgagctccacctccggaggcggggccggccgcgcggccattggtcggcgccctggagccacctgcccctaccttgggggcggggttacctgggccccgccccgcggctcgggttccggggccgcgtccctgtcctccgcccccgcccccgccccgccccggcgcgaggccccgcccccgagtcccggggcccaggcgcctcgtgatgtcaccgcagcttgatacaaagagcccttcggcccacgcgggtctcccggcaacgggcgggggcggggccgcgccttccactggtgcccagaagtgcgagcggcagcggcgcggccgcgattgttcctgcgcttcggggctgcccgccgcgtccccgcgcgccgccgacccgcgcccgctggcttccgcgcctctgccggggagcggcccgcggatgcgcaccccgccagctctcgggagccaggtaagcggcggccccggggctggcgctcgcagggctccggcggcgcgcacctggctcggcccggcccgcggccccgggaagttggcggagagcggacttggcctgggaggtcgtgttacctgagccatctcgttcggccgcgagtagaagccgctgccaggtgcgcgggtggcggctccttccccagcgcagttccaggaagtgcttttagtggactaggaagggggctcgtctgctggggcgcctccctggggacccgacggcgggccccacctccggccgcagcgcccctgccctcctgcccttgcgggatcggcgtggtacccagcgccgtacccttgggccgggtccccgagggggctgagcgccgcgaagtttttctgtagctcttggcggctgcacagagcctgtttcctggcttcccccgtccctctgggatggtggaggtggggagtcctcggggccagcccaggtcgtggtgtggggccggggccctgcctctccccagccgagaagctgcagtggtgggaggtgtgttgtggcccttgaggcggccggtctggcccggtggtgggagctgttggcacagccgcttctctgtgcgggcgacaagtgtctccaaggtcctggcggcgcagtctctggagagcgtgtctgtgctgtggggaactgggttccgacacagccccgcaccctactcctcgcccatgcaaactctccagtgccttctctttcccttttccctcaccctgctctcccacagagggctggaaatgacacctcactcgccccgagggccatgccagttttccttgactgaccgattttctcaaagcaatgtgagaggtctgggtcctgtctctgcacttagcctccaccaggtcttggagtggcagcaccctgggctggttcctggtgatccaccaaacttctgccctgccctgccagagcaggaggcaggtggcattggcttgggcttctgggacgctgaaaagcaatggggcaggcacattccttagaacatccccaggtcctggcccagctgaaaggtggttacagtggttgctgggatgggaaaaaggagactcaaaggggtcggaggcagtactaattgtgtgccactagacctctgcaatgggagcgctctcactcccccccatatcctccccccaccaactagccttgcgttggtggagtgcctgagtcgctgcctttgactggggtctcccccaggtgctggcaccctggcactggcccaaaccttaccctgctttctggctttcggggactgttgattatgttcccagggaacattacacacgggacacttccctgccttcaaggtgtttgcaagctcaggcagtctgaatactgggtctgctctgggcctgcccagctcttctaagttgattgcaagttgcctgcagttgtctttgaggtccctgtcacttcacaggggagagtgtcgcctggcggggtgagggaagccgctagggttcttcactgcagaaggcagcaccccttgggcaaatgcgtagtggagaacagcttcggaatttgaagggggggcctggacttaggcgaagggggtggagtaaatgactaaggccagtagaagagataagactgggccggaggcgaggggcgggactagccaggccaggtgagccagctggaaggcatgacctttgccctaagggaggtctgtaggagagactgcctggagcctgccctcggaagggacttttaggcaagtgggggaggaaaagcagaagaaattagagggcccattgggttctaagccacctcctttggggttccaggggcagcctgcactcggaaggctctgggctgcagcttgagatactccaccggccctcactctccctcccgaccatctgtgccacttctaaagcatgctagtgccttcctagccccttcccctcctggtaggcaggctgcttcagacccaaggttttctctttggccgttcacctggggcccttgcaactccctccttcatctgtacccgtaggtatctggcagtccccgatctgggcagcccgttatgctgaggtttttcacaactgattctgttctgaggagacttcgcaatttcactttatatgttttaggtatgggtaaggagggggtgaagggggtaggagaggctcccaatgaaatagcaggtgagcagttcccagaaggcaggcatctccgaatgagaaagggcatgctgtttcctggcacagggctcattgtgtttgaaaaggaagcatcttttttttttttaattgagttgagacagggtcttgctctatggcccaagctggagtcaagtggtgtgatcagggctcactgcagcctcccaccctcccaggctcaagcaatcttcccacctcagtctcagctgggactacaggtgtgtgccaccctgcatctggctaatttttgtttttgtttttgtagagatggggttttgccatgttgtccaggctggtcttaaactcctgggctcaagggttctgcctgcctcaccttcccaaagcgctgggactacaggcatgagccaccacacccagctgaagcatctttatctgttcgtgcctgctgtctggtgttagcagtggggcacagtgccctggccttgccaggcatacagaacccctggggctggactctgtcttcctctgggtcagctctgctggctcttgactcaggaactgggcacctatggcttcaaacactggcctcgaagatcaatgcccagttacttcatctcaggtctcatggctggattattgggtggtcccatccataccaattaggcaccacaagacaggcctgcctatttggcagtcccacctggtgccttactggatgtcgtacgatctttgcccctgaatggtaccacagtctccctcaccaggaggcgtttcaggacacggaggcttccccatttctgtttgctcagcccccagcacatttcccagtacagggcaagtggtactgaattcattcaccagattcttcgttgcctactttgtgccagattctgtgctgggcactggagatacagcagtgaacaaaacagacgagaacccctgccttcaaggagctcgcaggatggtagtgaggcaggtagagcagtaaaacacggagtatgggagttggcaggaggaagagcagggaaggggagggagtgctgggtttcagagtcagacagggaagtcctcactgagaaggtgacatccaaacgaaagaggttcaggcagagaaaagaggaactgcaagggccctgaggtgggacggtggctggcatgctatgtctgtccacagaactacaagacaggatgtgattggagagcaagccagggctggggggacaggggacaagctcagagagatgggggaccacccaatgctgtgacaacccagaatcccaggaggaggaggagaggggactgacagtacaagtgagactagaaatccacaggcacgagctgccttccattgctctgcccttctcagagcctccgcgtcgaggggatttgggcattgaggcatttctggaggacaggcttctgtggccactgctgccacagacttccctgccctcagcttgagttgggtcagacgagcctgtccatgtgaacgtggaaacatttcctgccagactatgctgttgccaccacacgaatcaaaccagcaaagggcacgccggcgatgtgcatacagctgtgtctctgacagctgcctgggcctgcctgctgttcccacgggtcagctcctgtcgggtagggacaggtcctgctctcaaggctcataaagcagccagcagcctgcccgtgttttccgtactctggcctgtgtcacccaggctgtctcctcatctcttgtctgatcctcaagggttccctggcctccctcttcactccctctgcctgtggcaggcagcagcacagttctatggggtcctaaggaccccagggagtcactcccacatttgagcagcaactttgggtttagtctgtccaggttagggccccagatcatatatatgtgtgtacacacacgtgtgtttgcgtgtcatgcggcattcggatggggcatcctgttcatccacccccctgctatggggtggctgaaggttggggtgccctctgagtttttggtgggtggggcttcagcagggtgtcttggctacctctcctggccagcacatgttatcctgggaggatttgtagctttgggcctgaccacggttccaagcaccatgatctggagcccacactgggtggcaggctgcagagaaggtgcccccagaagcctggactgcacccttatctgttttcatttggagctattttctcattatctcatgccaagtgtctgactacacatggcagtccttccccaagtgtttgcagcttcatcataatactgttaattgaatggaatttgtcattggccagcttctgtggaccccattcaaggctgagtggatgctgggggcgcccagctggccttgctcagaggggtcccgagcgtcttggtgcttcaggagctgagcccccctcaagagcattgatgacaagagctcagattctcagaacccccctgagcacccagacaaccttggtggttacttcttcactttttcgcatgacctggaaaggagatgagacggggaggagaacataggcaaccagaaggacgtgcagcctacaagggtcgtatgaaggtcagaggggtggctgtgatggcccagagctgtggggtctgagtgacctccagcccagaaccgcccagcaggccagtgctagtcatgccagcacttccaaacccacttcttgactgaccttaagaaatgggaagttttccaactgttggtcacatttttaattgatctaacctgcttcatcttcccagacaagtgggttctttcccaacaatgtaaacattaattcagatgaaaacaaagctctgtagaagttattaatatctgtggctctgctcatgggagcctttctcttttgaggtaccagaaagaggaaggcctaaacagaactggagtgtgggagagtgggcgggctctctctctttagtcatctgtggtcaccccccacccccctgcgctgtgcaagcctgataccatggaaagggaacccacatttcaaatagctgctgctgctccggtgaacttggggtaagggagctgaggggtgtctaccctctgcaccagactcaagtctccctcctagaataggagcgagaatagcagcaagtccctgccccctgctccctcgttttcctggaagaaatgcctacctaagacacagacacctgcatcccacgctttgtcacccaatgcctgtttccttaaggagaaaaaatgggcgccagaaaacttctaggtctagatcctggctctgttgctcgctagttgtggaactttggacaggcgacctcacccttctgatttcactttccctggcctcactcttcactccctctgcctgtgggcaggcagcagcatggttctgtggggtcctaaggaccccagggagtcactcccacatttgggcagcagctttgggtttagtctgtccagtttagggccccagatcgtatatgtgtgtgtgcacacacgtgtgtgtttgcgtgtcaggcagcattcagatggggcatcctgttcatccacccccctgctttggggtggctgagggttggggtgcccaacaggtagaatggggttgataatagcacctgcctcgcagggtgatggtgaaaataaaatgagccatggtgatttaagatgcccagtctaggttctggcctttacttagttgacactcgtggacggttagatggttagagaggcaggccagtttagtaccaaaatgccttcagagtcaggctgtctctgggttcagatcctggctctgccccttgctattggtggaatcttagacaagttatttaatttctctgtgcctcagcttccccacctgtaaaacgaggatgaggctagtacctccctcacagggttcgtggtaagaggatgaggctagtacctccctcacagggttcgtggtaaggctcaaatatgtaaatgtatgaaaagcacttaaaactgtgctttggggtgagctgttattcttagttcctgcaggcttcagctggtttgattgttgtgactaataaccttcgcacctaacagaatgtcttgccggggagtgtcatggcccaaacaggaaggtggcagcggaaaaactccattactcaagggcctttgcaagagaagcaaaactctacttcctcagcttctgtgggtttttaaatcttttttttcaattttaattttaatttttttaaaaaaaaagtagaaatgaggtgttactatgttacccaggctgatctcgaattcctgccctcaggtgatcctcccaccgcggccccccaaagtgctgggattacaggcatgagcctctgcacccagccagcttctgtgtttttaacaaaccttgctcgggctctgcagatacagattctgggtctggggtgaagtgactagcatttgtgtggcagtctgtgaatgagatgtcaagcagcttccgaggtaacagacttctccccaggttcagtgagggagactgtacctagcctgtccttccagaggctgctcacactgccaggctgtggctggcctgccaaggggaggatggccctccacacctcggcccacctgcccttcacctccagccagggcctgcctgtccatccacctgtgcctagctggaaaagctggcttggagcagtgctgcccatctgccactgccagcccccagcatctgccttattaaaatgctgaggctctggctggccacaagccccaggagatttggagaaaagccagacaaaaaggtgcaggctgtgccaccgcccagccacactgggtgactgcccttggtagttaaccacagagtcatccagcttggctgcccagaggtctatagctccactcaggcgaagctggctagcctggcctagcctggctggttaggtgggcaggacagcctccacttgactgattttttttttttttttttttttttttgagacagggtttcgcatttctgcccaggctagagtgcagcgatacaatcttggctcactgtagcctcgacctcctgggctcaagtgatcctcccacctcagctgcctgagtagctgggtgcaccaccactcccggctatttattcatttggtagagatgaggtctcactatgtcacccatgctggtctcaaacttctaggcgcaagcaatccttccaccttggcctcccaaagtgctggaattacaggcatgagccaccatgcttgactcgtctgactgatgttaggcaaccttgaattgatggtctcctggtgaaatgagggttcttgttgacaaggcaggtctggccaacacatttttgtatgattatctgcacgattgcatcagttattagcaaagaaggattttatagcagcaggtgtgtgctcatgtgcttgtgtggagttgttgactgcccttcactgcacacacacagtctgcggaactgtgactgaatccctgttccctactcacacttacatggtattttctgggattctaaggcacattctttttttcctttcctttttttccatttaacatcttaaattggaatgtgtcgcacatttgcggattattataatttgacagcgcctttttcttggcatacttgaaataacggtgcattgtaaaatcagaggtgtctcagatttaatgaaatagaaactaggtaacctctggggaacttatataatttgtccagttcctccaaggatgcaggtggagccaccttgtagtggtggcagattatatgaggggaccctgatgtggttcaaggggacaaccttggattgggcttagattccagctttatggctcgccagctgtgtggccttggcaaagtagagcgacctctctgagcctcgggattttcctcccaccacatatgaatcgtggctccacagttgtcatggctgtgtgcaaggcaacattccctgtttctcttgctgggtatcatctaaggtctgccccgttccatctgggttaagagggaaaatgagggctgggagtgggtcactggccttcccaagggagcagagggaaactggtgttccaagggcttcttgactcagtttataatccttggacattactcttcttccctcgtccttctccccctttgcctgagttttcattttcacatgtgtttccttttagcaattttctttcaaatctctcctctccctttctgtaaagtcttcccacatgtagcctctttgaagctccctggggtgggaaaggggaggagggctctgcctgatggcctggatggcacagacctcagaagcccagtgtgctgtggtccctgcaagcttcagctcaagtccaagttctggtaccatcagcgttgctaactgccattcctgtggctgcagggtcagcctgagtccactccagtgcacagtgttgtccatggggtgctggatgtcgcatcgctgagagcatttggtattctctgtaccctccttgctgcgttaaaatcagacctggttcaaatcccagccctgcgacctttcacgaattacttaacctccttgaacctgtgtattctcatctaaatagtggctgatgcacagaaatacctggcacacaataggtgcttagcagatgcgtgctttccttgttctcaaatgtttaagacccctttgtggacaggcacgatggttcatgcctgtaatcccagcactttgggaggccaacgcgggcggatcacctgaggtcaagagttcgagaccagcctgaccaacatggtgaaaccccatctctactgaaaatacaaaaatcagcccggcgtggtggcaggcgcctgtaatcccagctacctaggaggctgaggcaggagaatcgctggaacccggaaggcagagcctgcagtgagccgagatcatgccactgcactccagcctgggcgacagagcgatactccatctcaaaaacaaaacaaaaaaaaaactgctttgtgcttgtttaggtgttaaggatctcggggagtgccagccagtggcactgctcctgagacagacggaggagttctgggcagggggcagtggcaaaggcacaggggcctgtgtgagcaggatgtgtcaggggccccgtccttcaggatggctgggctgcagtggggtgaggcaggacggagagagaggaggaagagtggtggggtgggcacccagtcggcacctacaggggtgcacatgacaaggctgcacagggtctggctggagcagtacagagggttaggtgtgggctgttcatggaagtcggggctgagttggggaggcaccaggagacagccacatggggatgtctgggtgacagtggcccccaagcaggggctgagtgtgcgctgctggctagagggaggctttaagagcaggtgatggttttaaaccttgttttccttggagatcttctctctgccccctccctcttgagattccaatgaaagccagtagcccaacctcctcagttttgtgtgtagtgtcagagattcgaagccccctctttgatgaggtggtgcttatgccccctgtgcataagaagcagcatgtgctgaggcattggggtgggtaaaggtgcccaggagcctggggtactagggaaggggagaggcagagcatgtcctgaggctgagacctgctggaaggggctttgcgagctgctctcaggagctgggcctggttctgtgggcagtggggagctcacaagctcttagagggggttcccaatggactccctgggagggagagtctccaccccatgagcccctaatgccctctcacctgtccccactgcgagaaagcctgccctggccggaggccctaagctgagctctggccagctatgcttgagtgacaccccccaaccccccatgcaagacagcagcttctggaacacgaagcttgggtagctgggtctagcaaaggccacaggacaaagagagacacctgaactgagcttgctgggaagaccatgggggctatgtgctgatgggaggtaccagaagatggggcagggaggaggagagggttataaaaaccaagggctctggcaggaggccctgcagggttgggaggaggagagtcaccctgctgaccctgacctgcctgctccagaagggcgggtcacgtggagccttggccattggctgtgggtaaacatcggtgctctgctggctgttcaaggcctgagggttctgtggcagaggaggagctgggtgggaacccaccctggctttggaccgtgggtcagctccatccaggcatgctctccttgagttggatagtggcctctctctggaaagttccatgtcacctctttggagggtgctcccctgaaaatgtagcctgacctacccggtggactctacgagaagaaagagctggcctgagccactgttttccctcccaaaccttcactttgagtgaagtgtttttatcatcgctcctcttatcatgatggtaaagtatggagcccccaaagcaagccccacagactcttggttgtgtgagtaattaagccctctcttcaaaaagccacatcttgaaaagctataatttgtagcaaaaaatagctgcccgttccaagaaccaggagagccctttatacgcaccccattcaactgcagcacgttacttcgcttttgagttgagttgctgggacctctggtccatgcttttcttgggggaaccagagatgcagtggctgcatgggaactggagcttccggtaggcatttgggaaatcttttctgagaatttagatgggacgatttaaattagggaactcctgatttgggtttgcatggccccaactttttgtgtgactccaaaggggagtaaagagaaaaactgcaggatacttcaggggaaagtggatgagactctctggacaccattcccccactttttcttttccttcttcctttctttcttctttttttttagatagagtttcactctgtcgccaggctggagtacagtggcacagtctcagctcactgcaacctcctactccctggttcaagcgattctcctgcctccgcctcccgagtagctgggattacaggcacgtgccaccgtgtccagctaatttttgtattttttagtagagatggggtttcaccatgttgaccaggatggtctcaatctcctgacctcgtgatccgcccgtctcggcctcccaaagtgctgggattacaggcatgagccaccgcacctggccacatttccccatctataaggaggaaaatgataattacttgcagggagtttaccacctctgtaaagcacagagcagactggccacatggtaggcgccctagtatgtcaactttgttctctttctctgagttgtggctccactagctatttgtagacaggagatctttgtggcttcaggtaggtgatgggggactgaaagctaagaggaaaagcctcccctgacctgcagcttctctttgagctggcatgcctggaattcttggggctggctgctgggtttgttttccagatgtggaagcaatttaagttctgttttcttaatccccaacagtttgcctccgaagtccacattctcatttgaaaatcaaggccgttggctctgtttgcagggcagagggtaggctagatagcctcttcaaaccctttttgtttaggaaatgggcttactggggcactcagatctgggacccagggcattcttgggacagtcacaccccatccaggacttggttaaaaggtgagttcactttctctgtgggttttccttggagatgattcactgagctaaattcagctgcaccttggttacaaaccagctctagaccgctgtggagtggcgggggtggggctcgggtttgggccatgtcacaggccagctggcgtccctctgagcagggtgcccacgtgtcccgggggcagtagcggccctccttcccacactgaccacaacagagggaggaaaatgctccagatgtcaggtagccagaaatactgtctggcacggagaaactggtaatatcttgttcagttactgagcgctgctggtcacagaggcagcctgacccaggataaaaggctccttgtgtgagggcctgtggctccagggctaactgctgatttattctcttgtaaagcaatcgctgtgtaggtaaaataccttttacatttgtcttataactatactaaatacagttttgggcaaacaaaaattgcctttgcaattctaacgtctctgaactgtgcatatgcttctctgaaattgaaatagaatacttatactactgagagaatgcacaagaaaatggaagtggctgggcatggtggctcatgcctgtaatcccagcactttgggaggctgaggcgggcagatcacgaggtcaagagatcgagaccatcctggccaacatggtgaaaccccgtctctactaaaaatacaaaaattagctgggtgtgatggcacgcgcctgtagtcccagctactcaggaggctgaggcaggagagtcgcttgaactcgggaggcagaggttgcaatgagccgagatcgtgccactgcactccagcctggtgacagagtgagactccatctcaaaaaaaaaaaaaagaaaatggaaataacttacttagattggcatatagtgtttatagaatgccatcctgataatcatagattcaccaagctttgatttcaacaaaatatcatctcttaagaagtagcagtatttcaaactaatcgtgaaagagaataagagaatacaacttttttttttttttaggacagaccaaaaataaatccctgagtctcttgagtaggttctggaaatccagttacagatgctccttgatggggttacgtcctgataaacccattgtatattggaagtatcataagttaaaaaaaaaaaaagaaaaaaatgcgtttaatacatctcacctaccaaacaccatagcttagcctaggctaccttaaatgtgcccaaacacttactttagcctacagttgggcaaaatcatctaacacagagcttgttttacaataaagtgttttatgtcccacgcaatttattttttgttgttgttgttttgtttgatttggtttggtttggtttttctttgagatggagtctggctctgttgcccaggatggagtgcagtggcgcgatctcggctcactgcaagctccgccttccgggttcacgccattctcctgcctcagcctcccaagtagctgggactacaggcgcccgccaccacgcccagctaattttttgtatttttagtagagatggggtttcaccatggtctcaatctcctgacctcgtgatccgcccgcctcggcctcccaaagtgctgggtgtaatccaccgcacccagcccatcccacgcaatttattaagtactatgctgaaagtgaaagacaatgctcttatgggtacttgaagtatgacttctactgactgtggatcactttgcaccatcatacagttgaaaaatcaaagtgagcccgggcatagtggctcacggtggcctgtaatcccagcacgttgggaggccaaggtggctggctgcatcacttgaggccaggagtttgagactagcctggacaacatgccaaaaccccatctgtactgaaaatacaaaaattagccaggcgtggtggtgggcacctgtaatcccagctatttgggaggctgaggcaggagaatcacttgaacccaggaggggggtgttgcagtgagctgagatggtgccatcgcactctggcctggttgacagagcgataccttgtctcaaaaaaaaaaaaaattgtaagtcaaaccattgtaagttgaggaccatctgtagttctctttaaaggttgaattggctgggcgaggtggctcacacctgtaatcctagcactttgggaagctgaggtaggtagatcacttgaggtcaggagttcaagaccagcctggccaatatggtgaaaccccatctctactaaaaatacaaaaattagctgggcgtgctggtgggcacctgtaatcccagctacttgggaggctgaggcaggagaattgcttgaacccaagagacagaggttgcagtgagctgagattgtgccactgtactccagcctgggtgacagagcaagactgtatctcaaaaaataaaaaaataaaggttgaattgaattgacctttaaaaagttctcttttgttatcagggtgagaaggtgggcgaaaaatccagactgagcttgggttggggtttccatgaagccttcctaggggaggagaagggatattggtatattggtctattggtctgctacggctgtcatagcaaaggaccacagactgcgtggcgtaaacaaccaaagtgtgttttatcacaattctggaggctgaagtctagcatcaaggtgtcagcaggcttggtttcttctgagtcctctctccttggcttgcagacagccatcttctccctgtgtcgtcacatggtctttcctttgcgtgtgtcctaatctcctcttataaggacaccagtcacattgcgttagggcccacccattaggacttcaatttaaatgaattacctctttattattattattattattttgttgtttgttttaagacagagtcttgctctgttgcccaggctggagtgcagtggcactatctcggctcactgcaacctccacctcccaggttcaagtgattctcctgcctcagcctcccgagtagctgggactacaggcatgtgccaccacgcctggctaatttttgtatttttagtagagactggatttcaacatgttggccaggctagtctcgaactcctgacctcaagtgatccacccacctcgacctcccaaagtgctgggattgtaggtgtgagcctgcagttcagcccggcctgaattacctctttaaagactatctacaaatacagtcacattctgaagtactagggattaggacttcaatatatgaattttagagggaacaggattcagcccatagcagaaaagggtcttgggaacctccttcaagggaagggggaagaggaagaggagggtgggcaaagcctggcagagtagaggggaggcagttctgctttcaggcaaaggcccatgggtgagggaccccctggggatggctcttgaccacctgctctatttggaaacatttctaggactgttatgactgtgaatggtcttttagaggccggatcattcttatgacctcagccatccattgccgcttgatctgatcatttgaaaccaagactgctcgtcgttctgttctcatttcatccttgaagctcatgttggtctgttcgggctccagtttctgtggactctacccgctaggatagtattctttcaggatggcttcactttttcatattcttttaagtagagccagacctgtcaggaaaaagcgaataaaccgatcaaaaaatcagcaaaagatccgaatagacatttctgttatatgtaatttatataaatggaaaacaggcatatgaaaggtgctcaacatcattgatcatcagagaaatgcaaatgaaaactataatgagatatcatcccatcctagttaaaataccttttatccaaaagacaggcaataacacttttccttcactagttcagcaaatttggggcaggctattttttcatgtttccatataatgtttactactacttcttttttttttttttttgagacattgtctcgctctgtcacccaggctggagtgcagtggcgcgacctcggctcactgcaagctctgcctcctgggttcacgccattcccctgccacagcctcccgagtagctggaactacaggcacccaccaccacgcccggctaatttttttgtatttttagtagagatggggtttcactgtgttagccaggatggtcttgaactcctgacctcatgatccgcttgcctcggcctctcaaagtgctgggattacaggtgcccgccaccacgcccggctaatttttttgtatttttggtagagacagggtttcgccatgttggccaggatggtcttgaactcctgacctcatgataagcgctcgcctcggtctcccaaagtgctgggattacaggcgtgagccaccgtgcctgtcctgtaactttcaaatgaaccaagtttcttttcaaatgagccatttgaaaagaaattagactaaatattatcaaaactaaggacattttccttcacaactatatgccattaacacacctgacaaaattaagcataattccctaatatcacccaatatctactccagattccatcctccttgtttatcctcaaaaggtcttttacagctggtggtggtttgtttgtttgatctgggatctaatcaaggataatattcggtttctatgtctctcagttaatctagaacagtggtttgcaaagtgtggtcctgggacaagtggcatccgcatcacccgagaacttgttagaaatgcgttttcttccagcctgcctcaacctttagaaatgcatcttccctgtggtgatgtgtaacttctatcccatttttccgtttggtagaagttagatcctaaggcttgatttgaattgagttaaatacttagttaagcccacactataggtgatgctgtgtacctcttaggcatcgcgttgggaggccagcgcctggttctttccaattagtgatgctaaatttgatctctgcattaaagggacagtagtctgtgttctccctggtagaggtatgtggggtgctttggtgttttgcagcaatctgtagggtgattcttcggtattgtgcaagtatctagtttttcattagcctttaatctactggtgttattctgcagttgttgagtgtagtgttctgtatgtatcagtctggagtttgtgttgttctggtcttctgtgtcctctctaattctcttgtttgcttattccatcagtaataataataatatataataattattatatattaatatataattattatataatatataataattattataacatataataataattataatatataatatataattattatattatatataataattatatattatatataattattatatattatatataataataattataatatataataatatataataataattatatattatataataataattatatataatatataattatataataataattatatataatatataataattatataatacataattattataatatataataattatatataatatattaataatattattattactattattaaagacagaatcttgagctctgtcacccaggtgcaatcatagctcactgtatcctcgaactcgtggcctcaagcaatcctttggcctcagcctcccgagtagctgagattacaggcatgcaccacctggctattcttttttactttttttttttttttgtagagatggagtctcattatgtttcccaggctggcctggagctcctggccacctgccttggcctcccaaagtgctggcattacaggtgtgagccacgttcagcatgttccatcagtttctgagagaggtgaattaacagctcccacttcccattctgttaagttttgctttatgttttgagactgttagatgcatagatataaaagtgttacatcttgttaaatttcaattgtgtttcttgtaagtggtatgtagttgtttttaatttactctgacaatattgatcttttaataggattatttactcagttttctttaaaagtattactgatgtggtagagttttaatcctacataatctttaagtttttaattgacatacaattgtacatatttagagagtacagtctgatgttttgatacacatgtgtattgtggaatgatcaaatcagggtcattagcaaaaccatcacttcaaacacttgtcatttctttgtggtgagaacattcaaaatgctatcttctagctatttttaaatacacattgttgttaattgtagtaaccttactgtgcaatagaacaccaggacttagtcctcccatctgactatagcttcgtgcctgttgaccaacctttccccgtcctcccttctcctaccctctccagcctctggtaaccaccattctactttctacttctatgggataacttctttagattctacataggagtgagatcatgctgtttgtccttctctacttggcttatttcacttaacacaatgttctgtaggttcatccatgtcacaaatgacaggattttattcttttttatggctgaatactattccattgtgtatatatacaccccattttaaaaatgcattcatctgttaatggatacttagttgactccatattttggctattgtgaattgtgcttcaataaatgtgggaatgcagatctctctttgacatactgatttcttttcttttgtttgtatacctagtagatgaattgttggatcatatgatagttttaaattctttgaggaacctccataccgttgtccataatgattgttctattaatacttacagtcccaaccgggcacagtggctcacagctgtaatcccagcactgtgggaggccgaggtgggcggatcatgaggtcaggagtttgagaccagtctggccaatatggtgaaaccctttctctactaaagatacaaaaaattagccaggcgtggtggcatgtgcctgtaatcccagctactcgggaggctgaggcaggagaatcgcttgattccgggaggtggaggttgcagtgagccaagatcgtgctattgcactccagcctgggcgacagggtgagactccatctcaaaaaaagaaaaaaaaggttacagtcccattaacagtgtataagagttcccttttctccacatccttgccagcatttgttattttctgtctctttgatgatagccattcttattagggtgaggtggtatctcattgtggttttgatttgtgtttccctgatgattagtgatgttgaacattttttcatatacctcttggccatttgtgtgttgtctttggagaaacacctattcagatcttttgcccatttttaaattgaattatttgtttttttgctattgagttgtttgagttccttatgtattctggctatcagtcatctgtccttttggatgattcaagcatttttttattccttcatttctctcatctattattattattactattattttaagatatagggtctcaccatgttgcccaggtaggccttgaactcctaggttcaagcagtcctcctgcctcagcctcccaaatagttggggatacagccatgcactgccatgcctggcttagatttttagtaatatgttttgttttattttattttattttattttaactaatttatttttagacagggtctcactcccgttgcccaggctggagtgcagtggcaccatcacagcctcgacttcctgggctcaggtgattctctatcctcagcctctcaagtagttgggacaacaggcatgcgccaccacacctggctaactttttgtattttttgtagagatagggtttcaccatgtttcctatgctagtttcaaactcctgggctcaagtgatccagccacttcagcctcccaaagtgctgggattacaggtgtgagccactgtgcccggcccgtttttaactcccaacctttgacatgctcacttgttattggaacggaagtggcacagtggggagagaggagtgagagcgtctccccacagtggatggctcagctgttcgggatgtttccagtgggatcacaccatggtccagggtctggtctgcatcctaatgggcttgaaaaccagatcttactggcttttcccacaccccacaacttgagtccactcatgctcactgattgtccctaaatggacctgcagagccagtggatccccttgtggtgagaaatgcactcacatgagcttgggcagcccttctctcctgtctgtcagcaggcttctgggagtgggtgctacgtgaacttggacacaggggccaagggctggacaggtgtggaatgttgagccaggccccaccgcctttggggcaggctggatgtgctggccagccagacctgacacctctggccagtgcctgggtgcacgcggcccgggtcggcctcagaccctccctcttggtgcttcccaggagaccactcgcttagcccctccctgaggacaggctctgtctttagatcccttagtacttcagtccctctgtcagcctcaggaaatgtgtgcatctctcttagttgagctcccaggaggttatctgacatctctcatttctgagtctttctgggagcctcagcacacaccccgcttcctctctgtgggctcctctgacgctgccttatcagcagtgtgtgtgttggggtgaggttgtgagatcggagagagagacagctcaagagttgtgatgaaaacactgaaagaaaggcagtgtgggcttcagcagcccttcctcggtgatgtttgtgcagcagcagaacttgttgagtgaccgcctttgctttatgtaaatgtcatgagttctggagaaacacaagcatggctttcgctttcttttctgttcagcaccaacctgaggttccacagccagtgtgtgccagatccagaactgaaccaaatctgcccaagagcctcagtctccacatcttcaagcccaggagtttgaaaccagcacaggaaacgtggtgaaaccctgtctctacaaaaaatctgtaaaatagggtgatttattacctccctctgggggtgatgcaagaagcctgcttgcttctcatgtgaaatgaatgagcacctggggaaccccagttgtcccggttgcccccgctcctggggtctgcaggcccaccttaggatggaagtggagcgcagcaaccaggtgtctacacaagatccactcctagaagctgcagggcgggagcagtgggccctgctgaggggtggtcttgagctcctggccacaccctttctggggtgagtttcaggaggtggatccggggcccccggctgggagaagagagtctggaagctgccctgccttggctgccatcccctgggagggagtttagctggaggaatggggcactgggtccctccctgacaccccggggcctctgagccactctggggatggaacgtagcagtgcagcatttcttcctgatcagagcgggaagctctgggctgcagagctttgatctcacagtatgtggtcagtccccggggctggctgaggtgtgggatgatccctcgtgacctggcgacctggtgctcccatgcttacccctggctctgttggggtgagccgaggcctcatgtctgagctgaggttgcttgttgttcagaaggcaaggccgaggcactgcctctgggtggatgcttgaaccccctttatcccacccttgccttggctggtgcctgggcaactctctgttgaaccaaaacctcttatcagcaactgataagtacccagccttgcatctgcagagcaaggcctgacccagagccagggttggcagctgcagcaggagtccgttacagccaagattgcgtaccagtctctgcggccaccaccttttcatgatgagagcagccaagccacagtggggtgtggaagaccccagccctagcaatcacatcccttccctgtggacctggggacattggcacctatgagttagctcagtaagctgaatttcctgctgcccataggaaggaccccgtgagaccttgacctggcccatctcgttccagagctgttggttggctgggagtggggtgagagattcatcacaggcctagccctggcaaccgctggactcccctacactaggcttagtgtgtgtccacccccaccgcacacatgcacaccttcccagcggcagcgctgcacgtgtgcctgctggtgccttgctgcaagggaagtgggcatgtgcccgcccaagctatttttaccctgccttgtccccacagagctgttctttggctctgagttagtgcctggggaatgaggccgttgccagggctgggggtggatgagctggaacctcggagcttcttggactcccttccccaggcagcatctcatcttaatgcttactaaagggtgtgactcgtgtgcagggcgaccttccataagagtgggcaggagaggaccctggtggggagaaagaggcactgatgtttggagggcaggctctggaacctgcaggtctggcttcctgcagccaaaaaaacccagccgagctgcagcccagtgagccacggtgggtagagggagaggtcccaggggctggatgggagccaggaggccaggaggtaccctggattgttttccttcaacacaatgacgacaatagtagttcagttttggggtgtggtggtgtgtacctgtagtcctagctgcttgggaggctgagctgggaggatcacttgagtcctgggagtttgaagctgcagtgagctgtgattgcgccactgcattccaagggtttttttgtttttgttgttgtttttgtgtttttgttttgttttgttttgttttctgagcactttctgtgtgtgctaagaccataaagtgcttaggatgtgtagcagctcatttaatcctaatcacagttaactccattttatagatggggaaactaaggcactgagcagttcagtaaccctgaagctgcagagctcatgaatggtgaatggtggagcagggctctggcctggccgtctactccagagcttgtccttaacgccaccccgcgcctccttttgccgtgtgttccgcgccctcatgacacaaggcattgtcctagttccctgtggcagcctgccaggcaggtggttccctccccgtgtttacatcaggcccagaaattaaacagctgatccagcatcagacagtcaggcagtgaccacaccagagtcggcacccaggtctcagggtcctgtggctgtgctgttcccagctcatcatactgcagtacagtatggttccaccacctgccatgtgctctctacagtgctaaccactggggttctgacatgtaaatccccatagctacccacttagggtccttgctctcacagggaaggtggacatgtggtcacttggggtccatgtactctgtgtgtcagctcagggaaacgcagggtgctggcgtgtgcctgtgaggtggctccccatgggggaggtggggagggagaggaccagatgctgcatccgctctgagagtgtggacagtgtggcattgttggccactctgaggctgggacggcccccacgtgtattgatacttggccttttcagcagccctgaattcatcccttgccaacttcctacaaaagaaggggtgacttggggcctgctggcaggcgaacacggctctcaagactggagagggccccacggcaggctgtgtgcctctaggttcccactccctgctggggacagggtgggacagtgggacagcgaggtaggggtgcaggggatgcagacctgccctgccagagtggctggctggatcctgttctccagctctctccagaatgccctggcctcaggtaattcctcagcttggcttctctgaggagggtgggcgtccctcctggctgctcgtctgtccaggacattgctggctgaccagccggggacccatggctgtaggaatagctcaccctctgttgcctgtagcccctcgtgaggccaggtcagaatttacggctcctaccgtgaccgactctccggtgtaaattgtcacgtgtggccccctagagctgccactgaggtggagttgactggccccattctgtaggtgaggagccaggtgctcacaaaggtggtcacttgtccaaggtcacatggcttgtaagtggctgggccagcagggccggaaacccagactgctaggccccagagctgagccctcacccaagcccacccccaggggcctcctggggcttctggaggaacacgctgctgcatccgctctctcccttcaccccggggtccgctggcaggtggaagaaagcctggggtggtgtggccatgtaccagccaagcctgtgggcctatggtggctggccctgtgtcccagggtacagggagctgtgagctcagggctggctctgggtcttgagggacagagccctggcaagtcagactgtgccagagacgatgcccggtgctgcctcctgaggataccacactgtcccttccccaaaggcccccaaaagagcagacacagcctttctgtgcaaaccctgggaacaccaggccaagctccaggcctggacatgtgtagggtccctgggtggtgactggacggccgtgtgtggactcctttttcacacagcaggcgggaatgggcaggaaaccggggctctgagaggcagtcttggaagctgccctgggcacagaccttacttgctgaccccggccacctagaaacatgagctctggggaggccctgtccctgccccaccactcctgccagccctccagagccaggcttgggtgggcgcctctgtggtgaggatgtagaccgtgcagctggggtgagcgggcagctctctgggcatcctgacgagcatagtgcggtgaggtggggtgatggtatcctctcccatgacccccagtctacttggaagtatgctcaacagggggctccgcgtgattcttacctgcaggcagcctggccggagaggaacccaccgcctccagaagtctgtgacccccaggccatctggaaaccttatgagggcaatgtttttattatggccaagttcttccttttcctctgcaactttatctaaaaaacatacaaaagggaaattggccaagaagagtcctagtatgcttgactccgagttctcccagcccatgaatggtggctcaaggagagagaagaggctgcgttctggcaccttccagcatctcccctccaggccggcgggagaaggagcaagggcttccaccagacccttccccagagggccggggaaacaagagctggggctggggactttggccctcagggaggagcaagggtgaccatggcaaataccaaaccaaggggatcttgggacaggcataaaccagtactgtcctgggctaaccaaggcgtgcagtaaactgtctttattatatttgaatttagggggcaaactactagaaatggttttaaagttataattaaaatttccgattgccttggacaaacaactgtgggttgaatgaaaaagtattaatgttgggaatagccatttttaagagaaaaagctggagagagtgtgtgcgcatgtgtggccaggcaggtgaggacttggtgtgtcagccgggtgtcaggtccctgcaggccctctgtgaactgcaaggttccagggcagccactctcccactctgagcctcatcttccccaggtgtcagacggagctgatgaatcccagatctctgccctgtctaccccaggcagctcgcacggggctgttgtgagggatggggtgtgtgagacaggcgaggagcttgctgaagggctgggcagatgtggactctgcttagtccaaggctgaaagcctgcccgaggaggtggtggtcttctttggagggtgggaacctggtgcccctgcttctgccctgcctgtgcctgagccaagccatttgaggctgctctctccacccggtcaggggcttgggccagctgctgggagtatcaggacgctgctgtagatgttgggtgagagggcccggtggttccacctgcatgtcatgagccaggtgttagtggggcagtgcccggcacacactcggcctctgtgtcctcgtgtcagtggccagaggccacgtcagacacctgaggagcaaggacgctgatctgcactgggccctctgcctgcctctgggagctggtgggccatagcctccccaggatgtggctgtagggggaaggtgggtgttggggaaacagaatcatgtccggacccggctgtaaactcccacatggccccaggcaagacccttcacctacagaaaggggaaaagaggctcagctcatcgggctgcggtgaagtccagaagaaacaccattgccaagttgctgagctctcacatgagccacagggcgggcattcccagcaagggggaactctcgctacccgtgtggccaggaaggtgaaaagtttgcagttcttcctggccaggtgaaagaacagaccaggcgcattgtcctctgagagccccaggtctcttctggtctccctcctgccttgtttctcttaggtgtccccgcactaacctgcagtgtcctgtgagggcgttaagtggatggacgtggaagttgctgcgttaggcggcatgctaaggagtcataattagtcacatgtccctataaaatgtgctctccttgttgtcaccatgaggtttgaaaatccacaaagtgtgggaggtgtcaaggataaatggaatcaagtgtgtggatgcaaaggcaggcggggtggggggccctgccctgccctgccctgccctctggctggaggacttctgatgcgctactctttgagcctctgtttccccatcagtaaaatggggataatgatcactgccctgaagagctgtcatgaagcacaggtgggataatatgtgaatgcccagctcggtctctggaacctaatggctgctcagtgatgctggtttccttttgtttctactgggatgcagcttcaggcttggggatgaagagcttgcttagggcacaagatgtgataggttgggagccatgtgaccagattaatgacatgtgggtggaaggggccctgggaaccctggggggattctcattacacaacctcagtctccacagtctctgctgttggcgtgcccggctcgctggtgtacgtgttattggtccatctggtgctcagcctatcacagcacaggcaggaaccaggctcatgataatattgccatctatttttagcccaggggtctcctggtggggacggacccccaggagggctgccagctcactggtagcagcagacggctgcacatgtctgggcaggcacatccaggcctgtcgctgagcagcttcttcagctgtctgagactccaggaggcttttcacagcctgtttctgttgcccttcttgtagtctcgggactgcagggtcctttaatagggtgccctgccagccctggctgaggagcacaccaaagaaccttgggaacaggttgacatctccaatgggtcaggtagaagcggtgccacctgagaagtacctacttcctcagaggtgaagtggccccagtaagtgatttacagagagctgcccctcggtctagggccaactctgaaccaggccgaagctcttctatctgatgatttaacaaaaggtgccagcatgtctttatcacacactgtcattatgctgggccccagacccagcacaagcaacgctcagaagtgaggcctggcattcttgctcccagcaaggctgtggcagggcccagacaggcagttgcctcctgggctgggcatcacatcttctggccagggtttattcattgaggtcctactgtgtgtcagatgcgaacgtgaaatacctcatttaatcagcacagtgatcctgtaagattccattgccattcctgatttacagaagacaactgaggttcagaggtgttccatgatgtgcacagggtcatgtagggtggatcccaagttgtgcagctttcactgcaccatgtggcagcagactctactagatcagggttgttggtcctaaaagctgttcagtgtgactgtgcccttacaccgtgcaccaagaagccttctagaagccgtttggcttcctctgacagacttttgtggtggttttaccagtggagggtgtccaggttcttagcgtcttgaacaaaaattggacaaaatgcacaaacaaaacaaagaatgaagcaacaaaaacagagatttattttattttattttttgagactcagtcttgctctgtcacccaggccgaactgcagtggcgctatcttggctcaccgcaagctccgcctcctaggttcacgccattctcctgcctcagcctcccgagtagctgggactacaggcatgcgccacctcgcccagctaatttttgtatttttagtagagacggggtttcaccgtattagccagggtgatcttgatctcctgacctcgtgatctgcccgccttggcctcccaagtgctgggattacaggcgtgagccaccgtgcctagagatttattgaaaacgaaagtacactccacgggatgggagcaggcccaagcataggggatcaagaacctggttgcagaattttctggggtttaaataccatctagaggtttcccattggttacttggtgtacaccctatgtaaatgaagtagtggcccacagtcagtttgattggttgcaggaggggaccaatcagaggccaaagtgaagttacaaagttacaccctatgcaaacatctgattggttgcagaaagcaatcagaaagcaaccaatcagagactaaagtgaagttacaaagtgatattcctatgcaaattaaaacttagcctgtgaccagcctgattggttgcaggaggggaccaatcagagatactctcagtttttcatctgccaggcagaaaaggttggggggcgaggaggcggtgcgggggggggggcggtggggggggcgggggggaaggggatgcaaagggagtagctacttgggctcggaaaattggggttttccttttgatttagctctaggaagtcagtgtgaatcagccttatgttccctgcctccagaccctattctgcctcagtgggggctctgatgtgccaaccagggtgccctgaataaagtggctagcctgactgtggcccttcttcgtggatggctgttcctgggagttctagctcctcactagatgctcatgagtcagccagtatgagaggtccctgggactaatcacctgccaggtgttcccacgcttagggttcgggatctgggcctcctgtacccaatccctgctgttttggcctggctgatgcccttgtggtctgattggaacactgagccctgggaagctggcctcacttatcttgtctctgctctctctttcccagggcagcgaggtcacaggccccacctttgctgatggcgagctcatccccagggaacccggcttttttcccgaggacgaggaggaggctatgacgctggcgccacctgagggcccccaggagttgtacacagacagccccatggagagcactcagagcctggaggggtctgtcgggagtcctgccgagaaggacgggggacttgggggcctgtttctgccagaagacaagtgagttaaaaccacctgaagctccatatttgccctctcagcccagaaatgtggttcttggaaagtgtctccaggaagtaaatttgaaacatgctcaaaatttgtatcagaggcattagtgtcatgggtattctgaatagcacaagattctaagcagactaaatgcttaacagtaagggatagttttggaattttaggcagctgtgcaaagtcaagtttttaaatttaattttactttattttcagtcctagctgtgcaggcaaagggagttttaaatgactagttaataatatgagatatatgatctcaattagttttaaaaagcaggttgtggccaggcatggtggctcacacctataaccccaggactttgggaggctgaggcaggaggatcgcttgagcccaggagtttaaggttacagtgagctgtgatcacatcactgcactccagcctggcaacagatcaagaccctgtctcaaaaaaaaaaaaaaaaaaaaagggcaggttacaaagatgtccatgagatcagctttgttaaaaacacaaacatatgccaggcaagtggcatgtgcctgtagtcccagatacttgggaggctgaggcaggaggatcacttaagcccaggacttctgggctctagtgcactatgccgatcggatgtctgcactaagttcagcatcagtatggtgacctcccgggaatgggtcaccaccaggttgcctaaggagggatgaactggcccaggtcagaaacagagcaggtcaaaactcgagtgttgatcagtagtaggatcacacctgtgaatagccactgcactccagcctgggcaacatagcaagaccccatctctaaaaaaaccaaaaaacaacacacagacatatgtgttaggaaatgcctagaaaaaaattaatctggaaaattaagcagttatttctgtatggtgggatgattttttttgttgttgttgttgttgagacagactctcactctgtcaccaggctggagtgcagtggcatgatctcacctcactgcagcctccgcctcccgggttcaagcgattctcctgcctcagcctcccgagtagctgggactacaggcgcgtgccaccatgtccagctaagttttgtctttttttttttttttttttttttttgagacggagtctcgctctgtcgcccaggctggagtgcagtggtgcaatctcagctcactgcaacctccacctcccgggttcatgccattctcctgcctcagcctcccaagtagctgggactataggtgcccaccaccacgcctggctaattttttgtatttttagtagagatggggtttcaccatgttggccaggatggtcttgatctcctgacctcgtgatccacctgcctcggcctcccaaagtgctgggattacaggtgtgagccaccgcacctggccagttgatcattttaattacttcccatctactctgctatattttctatattgagcatgtactcccataatcagaaatgttatttaaaaacagtattaagacctaagtgacttcccagtgaagcagtttcacctttaactttggtgttggcagaaaggagtcccttccatctcagccctcaccaagtctctcgagggatacagtgctgtggggtggtgggaagctgccaccattgtggctgaggaagccgagggggttgcaagtggcagccccttaccagaaggtgatggttacgactgctgcagggatttggagagggaagagaggggttcccatgttggttgaaccacatgaaattgacaacttttaatcatttccatcttcaaaaaagtaatttcatgtggttcaacctagtatatctcaatgcagggtttctcaaactcaagtgattctcagagtcctgatgttcttggtggggccctttgggtctgtggatggagaagaggggccgtgctgctcgtgctgctctctgggagcagccttgtaatcccagcagtttgggaggctgaggcgggcagatcacctgaggccaggagtttgagaccagcctggccaacatggcaaaaaccccatctctactaaaaatacaaaattagctgtgcatggtggcaggaggctactcgcagctactcaggaggctgtggcaggtgaatcactagaacctggaaggcagaggttgcaccaatgcactccagccaggcgacaaagcaagactctgtctccaaaaaaaaaaaaaaaaaaaagacaaacttaaaaaataacacagtataacaactatttacatagcatttacattgcattaggtatgataagtaatctagagacgatcgagtatacaggaggatatgcataggttgtatgtgaatactatgccatttcatatctgggacttgagcatcctcagattttggtgtccacagggggtcctggaacaaatctctcttggatgccaagggatgaccatactcagtcttacagtatctaaaattttagatccatttatattcattttctgtattactccgaatgtttttttttcctctccttaaagtgaaagcaagtttattaaggaaataataaaacaatggctactacagaagcagagcagctactccgaatgtttttttgtttgtttttttgtttttgttttttttgagacggagtctccctctgtcgcccaggctggagtgcagtggcacaatctcggctcactgcaagctccacctcccgggttcacgccattctcctccctcagcctcctgagtagctgcgactacaggtgctcgccaccacgcccggctaattttttgtatttctagtagagttggggtttcaccatgttagccaggatggtctcgatctcctgacctctgatccgcccgcctcggcctcccaaagtgctggggttacaggcgtgagccaccgcgcctgccactactacaaatgttttaacaaacctttcaacaactatttgatattccacaatttaataatttactaacattataatttaataattataatttgatctagctgtagctagacaattaggttgtaagcagtgttttgctactgtggagtagcatgggtagaattggtttgaactgtagaaatggtttctgtggtgagatgtttccctttagatagggtccctgaaatgtacttaccaggtcaagagctacaaacttaatcggtagtgccaattaaagggaaatgcctgtcagtttccccaccacgggctgtggctggggacccatgagtcctcctctgacttgggtgctctcggaccctcaggtccctggtccacactccatccatgacgacctcagacctttctacacactccaccacctcgctcatcagcaatgaggagcagtttgaagactatggggagggtgacgatgtggactgtgcccccagcagcccttgccccgatgatgagaccaggaccaacgtctactcggacctggggtcttcggtgtcttccaggtggccccttggtctgggatgtcatttggggtcaaaagttgcagaagcaatttaagcacatcctagggggtgggggggtgcgagtcctgagctggcccttttcctttgtcctcagctacttgagttctgctcctggggcttggggttgctaccttcgcaccctgattaggggtcaggagttcctcctgaattaactgacctaggaggctgcacactgggggccacggggctctgtgtcatcttgtatcctagaacctcagtgttgaagcatccttccaagtgacccctgtgatcccttctcacccacctgagtcaccactttctctgaaatgagctcgcagtttgccttagctgttaaatgggtatgcctcactggcttctctttgagcgtgttggagaagggatgatctgttgctatatttccactccctgcccctcccccgtaacaaggttcaaaggtactggggactcaagtaaagtcagctcagcagggtggtgtagggcaccagactggacagcagttaaggtggtgattcctttccctcatgaatcagtgcggggcagacgcctaggaaaatgcggcacgtgtacaacagcgaattgctagatgtttactgctctcaatgctgcaagaaaatcaacctgctcaatgacttggaagcccgactgaaaaacctgaaggccaacaggtgaggcccaggcccagctggggggtgagaggccggggggccagggcagggcctggagggagaagctacgggcatggcgaggcgacccctgctgtctgggcaggtgagagctctcagaggagggttgatccaggggctttttctgccacaggaaatcaggctgtttcttctcaggaccaagctgactagtgaattcctttcagtgggagggaagagccttgtcctgcactgtggtgtcttacagctaggacagagtaagggagtggactagaacccctctgttcaatgactgtttcctttctctctctagccccaaccgaaagatctccagcacggcctttggacggtaaggcccgcctcgagggagggcaaattgagtgctgtccccatgctgcccactggccggggctccctgccagcagcccggactcagctggtgcccgcatgtggctgagtgagcagaggggaacgaggccatcccagggcagtgcagccagggcagcgtcacttctgaaaaagaggggccagctcctccctgctctctccccaccccttgtcccttcttcaaatcctaggtcaccttgacttcaggcaggcatgccagggatgccctgagagagacagagcaccccacagcgttcagtgcccttcctgcctcttggagctggcagccatactcaataaagagaccccgggtttcctgcaggcggggatctgggcatgagtgtgcgccattggggctggtcactttgctccgattaagtcctgcggcagttcagtgtggccccaggtccacactcagggctctgggagctggcagcaagggcccaggagctaggtgggttggcctcttggcagagaccctggctgctgcctatcagggagctggaaggggatgtcactgggggtggcagctggattttgcctcaggcacgggttagctcagcaggcccagtcccaccccagctcactgctctgcaaggcctggagaattctctgcctttgccatcccccagagttcccagagacgtagcaggagccagcttggtggagaggctcaagcctcaggaggcccagaccctcttccagggccatggagctgggctacctccttgggggcttccccactggaagaggagggggctcacgtgccagctgaggtcactgggtagctgcaggccagcatgctggcgtgaagagggttctgaggccgcaggagaagctgtgcgtcattggctgtgtctgccaggggaccccgggggtctgtacagcccatttgccatcctctgggcggggtgatccgctgagtttggcaacattcttcctctcaggctgagtgagggcagcctccttaaaggggcagaccccctggggtactggatgctcgcctagccagtagtgtgagtaggcccctgtctctggaaggcccctgcagccagacaccctcctcccacccctgcaggcagctcatgcacagcagcaacttcagcagcagcaatggcagcaccgaagacctgttccgggacagcattgactcttgcgacaatgacatcacagagaaggtgggccttgggtggctggagaagggactgaatgcatgcctgctcccaggggagatggggtgcactcaggctactgtctggggacttgggagaccctgtacctgcctaggaattgggggcaggtggccctggtcacgtgttccccactcccccaccccacacatgaccgttctcagatacacagtggtttggaggtcctgctcatgaacctcatggcgtcgaggttctcggttctgtggcctcagaggtcttctccaccccaccccggccccctgctgcaggtaagcttcctggaaaagaaggtgacagagctggagaatgacagcctgaccaatggggacctgaagagcaagctgaagcaagagaacacacagctggtgcacaggtcaagcaggcagcggcgctgggggctcggccgtgacgctggggaacaaaggggggtccatcttgctaagacctccaggaggaggcagcctcatgcctttgcagctctgagggtctgtgacgcatcagcctcttgtcacatggccctgcccacatgtggtgcccaggacaggaccttagggacagggagacaggttggagcttgaccttggctctaggcccaatggattctaccccctgaggtctgaagccacagggctggtccaagatgggagtggggatccactgtgtctcactcatacagtgacaggagcctgacgtcccttcctagggacaagctctgcaggggacaggccagtgtgagctgggcggtgggaagggtccagcactgctgctgatggaggtcccctgagcctgccgttcctgatgctgtctgcagtggtggattcagggtttagttgtcctcaccagatggcatgacccttgggggacataccctggccaggggtccggtcctccaacttgtcacagggcccaaagatgggcccttttgtacaccccagaaggtcagcctggtggaggggctgttgccagtgagacgtatcccagaccgaaataccaaccaggctgtcactggggtgctcacatctacgtgcccctggccctgtcccaggtctggggcagacttcaggccaccagccaggatgtgcctattttgggagtcaaggtgcccaataagctgaattattaatcagaggggtggccgggaaggaacagcacaaaaagaagaggtgaggcctgaggtggttccggccaggtgtggctgcagggactggtgggggcggtccctccctgtgctgccctgagcgccccaccttctgactgccaggcctgcccctccatggcatgtgtgaccgacaccccctctatatgtgcggtgtccccgttcatctctctgaaagctactggcccacacgccctcagtggacatgccagtgactcagggtctcggggcccagggtcccccgtgccacagcctgggttggggtgaaatggtgcaggccccaagagcttgcccattgcgctgtcctcagggtgcatgagctggaggagatggtgaaggatcaggagaccacggccgagcaggctctggaggaggaggcgcggcgccaccgcgaggcctacggcaagctggagagggagaaggctaccgaggtggagctgctcaatgccaggtgggcccctccaccgagccccctccctcagagggaccccctgtcctggggcagccctgtgggataggcgctatccccattttatagatgggaatgtgaggctgaggggcagcctcttgagactttccagtagtaacagttccactttaataccacgagaaacacagaggcatgctcttcaggaagttcgctaaggaatgttcccaggagcgtggctcacatttggtaatgcaaaccacacaaatgtctgtcagagaaaagggcctgggctgggtctcacatccaggcctggagcgccccctgctgtcaggttctcccctgacccctggtggactgagccagagccccagggccaaggtaaatggaaaacccggctcctgtgccttgcgtgtacctgtggcttcgtcattggaacgtgacgcaggcgggacaaggagcagccccgggccagggatctgagttggtctcccattagctccatggccttggacgtactgggtcacctccctgtgtgccccacagagcggctgtgtgggtgggtgagccgatgtaagtccagaccctgcccacgggtgagggctatgatgatgcctctgtgatgaagcccctttgcggcccttgaccgaggccgaggaggccgcctgggcttctggcagagaggacagctgccctggcactcctcaggccccctgaggccccagtctccatgctgaggcttcccagagttgccgagccccacctggcggctggtgggctgctgagcaaatgactgggagttgggctctcaggcaggtacctccctgcccccgtgtccctgcccctgtgcagtttggtgaggagacttcccaactccccggtgtctgagacctgctttgctaagttacccaccaggggttcattttacattttgactctattctagaagctgctgttttgcatctgtttctggaggctggtgcctagttaagggtgactgctctcgctcagcccgcctcggcagctggcccaagagaggtggctgggacacgggaggtggtaaaagacagtgtgaacctgggccacaggacaaagtgcagaaagccagccctcgggaactgtctcctaacgtgtgcccgtcacacagctccgggggcgccattcgtgtaaaatatccgagtggtgttcccagagtcctgccgtatgcttggttccctaccacttccacccgcttggggccacctgctggtggtggggctgaattcctctctggagcccagagggcagtggaggcccagaagccatccttccaggaaagaggacatgatggggaggtggtgggttgagaacgggatgctctgcaggagtcactgccagaagtgaccctgttcagttctgctgccaccgacggcccaactcacctgcacctattctcagaccatttaaaactgacctgaggccgggcacagtggctcacgcctataatcccagcactttcggaggccgaggcaggtggatcacgaggtcaggagatggagaccatcctggccaacatggtgaaaccccatctctactaaaaatacaaaaattagccaggcgtggtggtgcgcgcctgtagtcccagctgctcgggaggctgaggcaggagaatcgcttgaacccgggaggcagaggttgcagtgagctgaggtcacgccactgagactccgtctcaaaacagacaaacaaacaaaaaactgacctgaacacccaggctctgtcttcttgtggaatccctttaggattccctttgtggaattcctgtgtgaacgctaacacagaggattattactgtcagagcccatgcctgtggtcatcagagggaggtgcagtgagcgctcagagaagagccctggatgagatgctgttggcggagaatgaaaagccaatatgatcattgccttcaagttacagagtctaacaggagggcccagtcacagaagccacaagaagactgtttctccatctagcagaaagacatccccgtgttgtctgaggatctgaaggatgcatacaagaagaatctgcgttcctactctctaatgaatgtttccacttattggaaaaataaaggccacgtgtggtggctcactcttgtaatcccaacactttgggaggccaaggtgggcggatcacatgaggccaggagtttttgagaccagcctggccaacatggcaaaacccgtctctactaaaaatacacaaattagctaggcgtggtggtgcatgcctctaatcccagctattcaggaggctgaggcacgagaattgctgaaggagttagaggttgcagagctgagattgtgccacctcactccagcctgggcaacagagcaggactctgtctcaaaaaaaaaagaaagaaaataagaatgataatttactattttgcttacaaatagtccttactattttgctttggctgataggaagctcacggctaaattgtctttgacataataatcatattctttctctcagttggtttctggtatctttcctctgggaggaagcagagaatcactgcagactggcaggcgcttatcagatagtctacattccaggtttctgagatttgtctttctcctttcgccagggtgcagcagttggaggaagaaaatacagagcttagaacaacagtgactcggctcaagtctcaaacagagaaactggatgaggtgagcagcagatccaggcttggaggggcagggctggccatcgggagcctttagtttattgcttctgaaattctaaacaaatgccgcaccccctaagaaatgcaaaaaaagtgaataacaacttgtgtttctgtatttctgattttccaagttttctacagcgaatgtatttattactttatacaatggagaaaaattagttttagaaagaggttagcttctatttgggctaacaccttcaattcaggttgcatctagcatcgttgaaggacttcagaggcctgaggtttttagttgtatttctagaatcatcggggctctggccgtttctgtaagccaagactcagggctccgtctaagggagctggtttcactgtgcatctgcctcgtgaagatggctgaccagaccccagggacacccctggacatagtgagcccctctctgggaactctcctcccctgatcgggtctccctgctccaggagcggcagcgcatgtctgaccgtctggaggacaccagcctgcggctcaaagatgagatggacctgtacaagcgcatgatggacaagctgcgacagaaccgccttgagttccagaaggagcgggaggcgacgcaggaggtaggtcccaggccagcaggcaccagggctccttccagcatccctgctcctgccaacctgcttctctccctcgcagctcatcgaggacttgcggaaggagctggagcacctgcagatgtacaagctggactgcgagcggccaggcaggggccgcagtgcctcctctggcctaggcgagttcaatgccagggcccgcgaggtggagctcgagcacgaggtcaagcggctcaagcaggtgggtctagcagtctctgtgtccagtggggcagggtggccgggcccaccacgtgggtttcctgtgcaggatctgtggtaggggagcccagagctgtagcagcactgcctgtctgcttctcagcaacctgtttgccagggctgactgccccatttcacagctcaggaaaatcgatccaaagatctctcccttacgtctatgtaaggaaatagaccctgccttggtgctcagggtggaggatgagaccatacccagctgcagtatagtgcctggaggcattgggttctcccagaagtagaccctcacccaaggttcctttttttttttttttttcccaagagacagggtcttgctctgatacccaggctggagtgctttggcactccatagctcactgcagccttgaattcctgggctcaggtgatccttctgcctcagtctccctagtaactaggactacaggcacacaccaccatgcccagctaatgttgtttttgttttttgaggcagggtctcactgtgttgcccagggtggagggcagtggtgtgatcacagtcactatggcctcaaattcctgggctcaagcaattctcctacctcagcctctcgagcagttaggactacaggagagcaccaccacacctggctaatttacttatttatgtatttatttccagagatggggtctccctatattgcccaggcttgaactcctgggctcaagggatcctcccacccttagtctttgaaagtgttgggattacaggaatgagccactgtgcctagccagaagattacatttcaaggagcgctgccttagctagagacctttgggtgggggagtggatcaggaggaggcagtggccaggtggtgctgggtgaagtgtcagctctgcctgaccctgcaggtggaagagcctgcagcataaattatccttctgagtttgttccactggggacaaaggtgctggtggctgtgctctcacagaaatcctaaaaccccaacccttctcctagtctaggggtggggtgcccagggtcccaggtgtgagcattagggctctttaggcaaaagctggagtgtgagaccggtgcatgggatctgggcgggtccgcctgggtcaactccaaccaagcaggattcggaacgtggctgctgggggagccaaggaaatgagctggccagcctgcccagagagcccagagcatcacttccttcactgggctgctgggtgggtgatgtccctatgcagggcctagggaggaagggatggccaggagccttggctgcgctgagcagggctgtaactcctccacaaaccctgtgcactcccaggatgccagtcccctggaccaggacccagccctccttgcccccagcgcttggcaaaggctgcaacatctatggccccttgaaccagccgtgacacacacctgtgggaatggcgctggcggcaggtcggggacggtggatgtggagaagtgggttccagtgggctgtggatgcctcttggggttgatgtcgccttcgtccttctctctgtaggagaattataagctgcgggatcagaacgacgacttgaatgggcagattttgagcctcagcctctacgaagcaaaaaacctctttgctgcccagactaaagcccagtctctggctgcggagatagacaccgcctcgcgcgatgaggtaaccacaccaccggctcttgctttggggcctggccgccctctgtgattccttctcccggcccccacctgcccagagtgagaaaaccagaccagggcctggcagagagtcccatctacagctaccccacatgacagggcaaggctgtgagcaggggagggggctgctggagaagttaagtcagctctgagttccgcctgtgctggaaggagtgcgggtttggttcagagtggagtgtgagtcttaggtcggccagaaaaatgccaacatagccagctgagtggatcaagctgtgactctgggttaggctatcactcccgctcttcccagtccagagagggaggacattagcatttccccagcacctgcttctgcggtgtgttttcacttaatctcctgatgactctgaggctttaggaacagctccacattccaagctgggaaggtggaacccaggaccacccagctagggagggagagggacccagctctctccaaagccaaagcctacccttcctgccacaccagagtatgcttatgaaagatcaggcctccaaaatgccccggctgcattgtaacatgaattacaagacactctgtcactgagcctcaccctctgcctgggacacggggtgaagagctgacctctgtcctcaaggagctcccaggtgagctgggccccaacccctgggcagaggcagcatgtcagcaatgtccgaaagaacactgccctggagaagagcagtgtggggctgggggtggggagaggtgttccaggcaggagacagctcccctttggagtcttagcggccctgggactttgtcagtcttgattttaaatgactttggctagtgttttctacttttgcaaaaaattacccacacctgggccccctctacaaactgatcacattggaatctctgggggtggggcctgggcacctgcataggtaatactaggggctgagccacttcgactctggtcctggcatccaaatgctgaggctgtcctggggcccaccttgcccaggatctcctgatgccctctattgtcaggcactggcctgcgacaagcctgggagtctggactctgcctgcaccctatcccaggcccagccactgacccgtctttcccatttccttcagctaatggaagccctgaaggagcaggaggagatcaacttccggctgaggcagtacatggacaagattatcctcgccatcctggaccacaatccctccatcctcgagatcaaacactaaggcacggggctggctgcagagcagccttaggaccctgggaccaagggcagaccctgcccaaggatgcaggcctaagccgggcctcacactcacactgtaaatgtctctctggccaccatgcgttacgtgtacccgtgtatatgtggggaggctgtgcacacgagcgaggggtgagtggccgtggctgtgggcagcatccacacggttagccgtgcatgcactttgtggcccctttgcaaggggcagagggtactggaagtgggaggaggcaaggtctgctatcaggagttactgtaaaaacaagaactggaagctcgtgtttccggtactgggtaaaatgattctacctctggggataaggattcacattcgctctagtacgatgggctctttcaccccactcctagtccccttgggagtgggagcaaaattgtgatctttcctaggagtttgaatgccccatatttgtgtcctcgccagctctttggccacctttcaagccccagtgttcaagctcagagaggatgaaggggcatctggagggtccatgagatggggccctcaccaaatgccttggccaccggccagcagccctctgtgatgtgtgtgcagagtgaacagaggactcaggtttcatagcagctagtgcggggcatcctcatcctgtacctatagagttcgtgcactcccccatccatgctacctacctccccgtttctgtttcagttttaagacaatgaagcagcattcactgcgtcattgtaacatgaagggataaaaatgaaggagaaggagggtttgggatgggtgtctaaggcaggagttgacatcgggcaaccaaagaaatgagttttggggaggaacacaactcccatcccagtcagtttccttcccatggctgcatcttaagatggatgcacggagaaaccgtctgcctggctccctgtcttcattctccacgcagcctggtgatggcaggcctgggtttggatttcagaatcctagctccgggctccactcgtgtggcagcaagactgcttcgttccagcgtttagaaacacacctgtatttgattctcagccaggggagcactcgctgcactggtgggaggcggttgggaaagttgcaggaaaaccttagtcttccatccttctgacccatggtggaaattcacaccatggatttttaatggatctttgttctaggcagctgggaatagacatggtacttaccttagagttttccaatttatctcaattttatatggcttgtgattcattttcttaatccaaatatatataaacgtgtgtggtcttattcttccccctgcagtttcttgctttcttcagcacatcttatagtatgagaaggaaggtttgggcatgttgggaagggcggtggagggggagttgcagaaagagagggcagtgagggtgaggagaggggatctggggacttgggtgtgacacctgcttgacagaggcagggctgtggccaggaccaaccttcaattccattccaatcagcctttgcatttgttggatctcgtggcttctttttaatcttttgttggggattagtttcatgctgcacataatggggttgcactggtctgacccaggactttggagccacccacactgggaagactaggctaggcagtcggtcttctaggagtttctcagccccttaggacgcgggtctccttgggctcccccaagggttctgcgaagaggcagtggaagaaggcatgaggagagggtctcttgagaatttgccaataggaaggagtggccacggctgaaaggaacaagacagatcctgacatagctttggcctgggtgttaggtcagaaggagtactggtgcgtgggggccttaccccagggttgagtattttatctgtaaaatgttatctgccctttggctgcattggaatttcagagaaggctgcagaggcctgggttacacagcctgagtcacaacgtgggaaggaatctctgccacgggaaaggtgggcggaagcagctggcagcctggggcgtgcttcaggctcctccctctaaggggcgccatgggaacaggctccggagggagccggcgtctgaaaggcccccgggacctgctgcagtgccagaggggcctctggagcaggcctggcttttaaatggggggctgaattccagctcacacacacctcaagtccaaccttactttcttcagccagaatacatttcttgtaaaacctggcttgttgcttggcttttaaagatggtgtatgtttgtaaaaatattcttctgggctcaaaagctagcttgagggggcagatgccccaggtgtcccagctccacagcccctggcagatcccagaccccttggtggcaggtcccagagcctaggtggtaggagcttgatctttgtttctgcccttacccctcagtagtggggctgcgaggtagtagacaggatgcccagttaagtttgaatttcagatagaaaataattttagaataaatatgttctatctaatacatgggacagatgttatttttagagataggatcttgctctgttgcccaggctggagtgtagtggtatgatcatagctcaccacaaccttgaactcccaggctcaagcgatcctcccgccttaactgcctgagtagctgggactacaggcatgcaccaccacgcccagctaatttttcttattttttgtagagacagggtctcactgtgttgcctcactcgagctgctgacctcaagtgatcctcccacctcagcctgccaaagcactgggattacaggcatgagccaccatgcctggccaggacatatttgaaatggggagattttaaaaattctgatgattagactgaatcctcagacgttctggtttgattgttgtgggtgtagcccaggcatgggattttttaaagagctgctcaggtaattccaatttaattgcgtgtcctacttgggttttttgtttgtttttattgtttttgctaaacctggcaaccctaccgagtagggattagcagtaacttatctgaaatttagaggtgttttgggggtggggcgagggtttctgtagtagactcagattttacatggccctgagctgcccttgcgttcagttggaagccacgcaaaatgaactgaaccaggagtgagcttcgtgtacattatctattagaaaatgaagtaccttctggttcagctagtccctgtgcgttgagaggctttaagaaacttctagtaaaaatgtttttttcttttagctttgaattggccagagtttatcctagattattttattttaaattggtagaattctttgcgaactgtcacagagaaattccttttcatgactttatttctgacctattaaaacatgaacaggccaggcatggtggctcacgcctgtaatcctagcacttgggaggcagtggcaggcggatcacttgagctcaggagtcctaaaccagcctgggcaacatagtgataccttgtctctaccaaaagttaaaaaaaaaaaaaaaaaagctcaagaacctgcacgagggcctaaaacagtgggctcagctttggctgtgcattggaatcacctggggagatttgtaagcttctgctgtctgggctgaacccccagaggttcggattgaattggtgtggggtgtggtccaggcatcgagatgtgtaaagacctccccaggtgatgatatgcagtccgaggttgagactgccctgtcctgcaaggtcgttggccagaggtagaggaaactggtcaaagtggctgttgggcttgtcaagcccgtggctgaatgacagtgagctctcttgctgggagggttccttttcctgttgttgaatggtcctggcctgcaggatgggaggccagatgccttcaggagctggtggatccagctgttctcaccagcctggaggttagcagaccagagtgggtgggcaggaccttggcctggtgcccctggaatcagtgggtggcatgtgttgggatatactggctacaggctcatctcaaagagcaggtagaacagagtcagcagggaactgacaggtggggctgtccccctgaaagcagccgcagaaacagctgccacctatttgcatagctgagcaggaggacatactgtctttgtgggttttgcttctggtctgtttcctgactgggttgataaagggagtcccagctcgttccctgttagccaaaccagcatcctactcacacaccggacactccaggtgctagtccactggtgctggtgttcaggggagttggggggggggggcgcggggacagaagcgcgggttcttggttccaatgagggacttagcagaagcctccaggggccagcagggccaggtgaaactgggagaaatgaagccctctgtgtcctgtgtgtgtggtggggtttaatgcattagcaaatttaaacttaaaaactaactctaggccgggcacggtggctcacacctgtaatcccagcactttgggaggccaaggcaggtggattgcctgagctcaggagttcgagaccagcctggacaacatggtgaaactcttgtctttatttttttaaaaaaacaaaaagtaactttcgatgtgatcataccaggaaagttttgcgtggtcaccatgccaagaaaatgactttggttgcccagcagatccacagcgactctttctcaagggctactgtggattctagattgaggaaaggggccacttaggactcagtgctggtatcctccacagtcctttctcccagactctggccctccctttgggacccaggaaatcccctctagggtgacgctgctggctaggaagactgaggtctgctgcgccaaggggcctcaagttagaagggccatgccgtcagtggatgactttgagcgctgatcctagggacctgccaggtcctcacttcctgccctgggtgcacacatgaatggggcagccagcaggaagcgggagaggctggaaccaggagcctgccctacctgcatggcaggacaactctgaggcccttctgccatattctctgctacccaccagagaaaataggctgccttctagaaagatttgtttctaaaagcgtagaccctggggaagtataatgtcaccatgctcaccaggcgaggtttcccatatgacctccctgccccgacctcgtaggttgctcctttccccatctgtaaggtagagatgtctgccccggagctaccagctggggatggcatccaggccatgtctcctgcaggatccaagtgctgttgtccccagggtgaccctgcctcctgctggggcccatccgctttgctgtgctgcacaggctgttttcatctgcatggtttggggtctttgtccttgtgccttttcttccccatcgccactgtacaggattttccacattgcccactgcctccttttctacatcgtctcatctccctggcctttcccgagccctgtaaatgtgtactttttcaacgtgcctcccccaggtgaggccagctctcccgggcacattcgtccacaaggatcaggccccacttacccttggctcgctcagcctgtagacttggtaactttgtacagaatctttcattattgtcttaagcatggggggctaggacccacttagtccctcctccagcctgcagctaatttaggagccttgcattccagaaaagggcaactttgtgtaaagcagcttctcccacagagctttccctgcattgttagtgatgtcgggcaaagcatcactctttaacctggggcattggccccagcagggatatcatgggaccgcagccgctccgtgcactgtctctgcccccagaggaagccctgtccatggttcctggtgcacggccacaggcctgccttgaggccaccacatctggtgtctagaacagctgcgggccccacttgggcagaaggaagaggtgctagctgctgcccctgcctgctgtgaacacctgcccagcccttccttgtctgctgaggtgctcagaccagagtgccattaaataccaactgatgtcacggagcggacggtgcattgccaaggactcacagctgtgggctcccttccagctcctcccactttcttggctgggtcttctgaggcctacgtggaatgaactacacatgtggcctcatgcccaagggtttgttagatggcctctgactctgtgggattcaacttgacttttttgccccaggaggctctgtctggaaacaggcttagctttagtgctggggtgggacctgccctgtgggccccagggaggggacagtgggggtgaggccctgaggctgtccagggtctgagctctttgcctccaacctgcttctgccccaaaaggaacaggctgttggtggcaggctcctcccggggagctgtactgtacagaccaaggtgtaaataaacagtttgctcttctcgcctgactgaaccatgagtttctgtggttgggggagggtgggcagaagaggcctggttccagggctcacagggacagatggtctcccttaaaaagagcaacccccctgccccccaccaagtttgtggttcccagggtggctggtgctgtcccccaggggcagggtggagtggggcggtgtcactcttcagtccctaggggagaagacgtggatcccagaagcctctttaatgccaccattccagccacagggctatgatgtttggaaactttgtcctttgtgtggctatgttctttcccactgaggtcttcctaggggtccagtggggtcccagtgccatgctccctccatgtccgccgctgtggctccccagggtgacggcccaatgcctccattcaggactggcttcagacctgccagtgcttgtctctgccacaccatcaagtaccaaggtggtccccagttgagtcaaccagacccctggatttctgccttctgtctgctccttcctctattacaggattccaggcatggaagtggcttcacaggtggccccggccctccacctcccagtgcaggccctggtgccatgagtcctccagggagggcagacagttcctcactcactggacttagcctcctggctcaggagacgtcacctccaaatcctgggagtgctgtgtcctcttggatctttattgcctctttcctcttttttttttttttttttaaagatggagtcttgctctactgcccaggctggagtgcagtcgcacaatctcggttcactgcaacctccccctcctgggttcaagcaattctcctgtctcagcctcccaagtagctgggattacaggcacccaacaccacacctggctattttttgtatttttagtagagacggggtttcaccatgttggccaggctggtcttgaactcttgagctcaagtgatccacccaccttggactcccaaagtgctgggattataggcgtgagccaccgcacctggccagttccctccttcctcctaatattccttctttccttcccaacttaggctgccagatttggctagtaagaatacaggatgcccagtaaaacttgagtttcagataagtagtccaacgagcctcatctttacttgattacaaatagggtctttacattgcgaagaccctgtttccaaagtaagcttgcataggtatcagggcttaggacttcaacatatcttttgggaggacacaattcaactcataacacctattgaaggaggtccttggaattgcctcagtttaccatcctggagagaggtgggagcgagcactgctgtgtgtacaggctgtaccctctcctctgcacaggtgtgttccccattcacccattttgcagaacatttccttacagtcctattaaaaatgatgtcatccctgtgcccccttgaggccacagcacctgctaaaggtgtttcattgttggattccattgactcaccaggccctcagttagagggccctttagggtcatcggctgggcccaggccaaagcagatgaatgggtggataatatctgagcacagaaatcactcaacccgccagcatcatctaccgagcaccactgtgtgtgccaggcactgggaattggtacaggcaaggcctctgccccgtgaagtccccacgctcctgggggaggggagagacataattcatttccagggtgatgagcactaccaagaggaagatatggggggcttcaggagctgggggcaagtggattgagcccactcaggcatcaggtatggcttctctcaaggaaggagcctttcaacagagctctgtaggatctaagggaactcagactgtaggatctaagggaactgccatggggaggagacttggagaaacagccctttcagggtactagagagggggatagtggagggctgcagcctagccaggtggtgtagagtctagggggccaagggtggatctatcacattcactcactaagcagatgctttaccagcacctaacagatgcggggtgcaggggaggtgctgggctcgtggcacagggagcctctagaatgtacaagagaggttcttaaaaccatcccaccccagcaattctgattccattggtggggagtggggcttggacactgggatgttttttaaagctcccaggtgattccaaggtgtagccaatggtgagaatcatggggtataaaaagggcacttagactcacctgaggaggcttcaactgagacttggaggaggagaggctggccaggtaagggagatgggagggcagggcggaagcaggagagggaacagcaggtgtggaggccttgccatggggaggaactacgaaccagctagctcaatggtaagcgggactgtggggactacgccaaagcattttaagctgggggtggcctggtcaggtcagtttcagagttgggtggtgagaggtgagggcagcctggactggggtgtgtcttagctgggactgacctgacagaacacaacaggctgggaggcttacacagacacttattttctcgcagttcttggggctggaggtccaatcttgaggtgccagtggggctgagttctggtgaggcctctctccttggcctgcagacagctgccttctcactgtgtgctcacaaagagctcattctctactgtctctttgttgtcttagaaggacaccagacctgttggattagggcttcacccatatgacctcatttaaccttatttacctcctcaaaagcctcatctccaaatacagtcacactggggttagggtggtgggtggttgctcgggtgagggagtcggacttctcacagccttgctgggagggtctacgtcagctaggccatttctccagaaaatgatcaagctactccccagggcggaaagcccctcattcttagaaccaggcttcaggcccaggtcccttgggagcagcaggcggcagcaccactaaccactgggtccagagacccatcaggtcagcagccggggtgctctgagagggtgggaccagttcctctcttttggttagtccagctggttgtccactctctcgagccctggggaagaggatttggcctaattcctccctctaccaccctcccctcccaaatccctgaggctaacccagtgcttggcccacagaaggcaccaatgaggtggttattagattgcttgcacttgtttagggcttactctagaccaggcagtgttccaagtgctttgcatgtcctgggttatctgtccctcacaactccctatgaggtgggtagtattacagatgaggaaactgagccaccacaggtgaactcactggccacatgtcacctgggattcaagcccaggcagcagggattcacctgggattcaagctcggatggggcggggtcactgcaggctgggaaggcagacagaacagtcaggacacatgctgagccctggagcctgggtcccctctccaggaacgaggggttgtgacatgagcacaactggagcagagccaggaggtagggcctgcagctctgctcacagccatgcggggcagaagagaggaccaagaagggtggcagctccactgtggctcagcctggctggctggactgtgccttaaagtgggctgagggggtcaaccctgcaccaagtccactgggagcggttgggggctccagggcccaggacctctgtagccagcttgaagccagacctccctggaactaacgaggtgactgggattagggctgcaggaagttcccctcactctcctgccacccctggttcaggtctggctctcacttcaaactccaagctctgactttggtatcaggctttgtcttaggctccatactggtgtggcctttgggtttaaaaaggagctagagtttctgaaaggcccaaacccagggtgcagaggtgctgaattatgagcctacttcctacagcctgcttgacagcaccaagcccacgggagcttgtggactctcggcccttgctttctagcccagctggcccctccagggagaaataccttttccagctctgccaccacttggccatggtttcagggttggctttcccagcttacccaggtcagcaggcagcccctgaccaaaaggtggactttgccaagctctggcagagcctgggccagaccctcagaccttggttctgcagttggggggctatgagcgtgggctctgaaggccatcagggctggaaggaacgtgggagagtatctgctccaaatactcccactagtgagccctcaagatgagaccattttttgaggtggggcagagacaaaggagacccactttgtatctctttacatctttgtaaagattgaacccagccccaggactgagttcaatttgtgtctactctcaaagtcacagagccagtgaatgacaggtgtgatacagtctccaaagacaagtaccatggatttattccctccctgggtgcaggccactattccactgagaggtgaagtttattcttcacctctttgaatctgggctaattctgtgactgctttgatgaatagatgcaaaaatgcatcacttgaggcagaagtgacattctgggactttttttttttagacgaagttttgctcttcttgtccaggatggagtgcaatggcgtgatctcggctcactgggttcaggcaattctcctgcctcagcctcctgagtagctgggattacaggcatccaccaccatgcccggctaattttttgtgtttttaatagagacagagtttctccatgttggccaggctagtctcaaacttctgacctcaggtgatccacctgcctcagcctcccaaagtgctgggattacaggtgagagccactgcgcccggcccattctgggacttctgagctctaaccttaagaagatcagcagcttctgcgtccttcctcttaaaatgcaccttcttggaaaacccagctgtgaggaatctcaaacagccacgtggagaactgaggccccagccaagactagcaggagagtgaggccatcccaaatccccagcaaccaccagatgaagcagaactgcctggtcaacccacagagccatggaaaacaataaagttgttattttaagatctaaatgttggggtagttgattagacacagcagtaggtacctgaaacaccagggcctccagtttcctctccaccaggcttcctctcagaagatcccccatcccagaaggaatccagcctggttgacagagcccagaccctgtctctaaataaatgaataaagccaggcgtggtggctcatgcctgtaatcccagcactttgggaggctgaggcgggcggatcacgaggtcaggagattgagaccagcctggccaacatggtgaaactccatctctatgaaaaatacaaaaattagctgggtatggtggtgggcacctgtagtcccagcttttcgggaggctgaggcaggagaatcgctcgaacctgggaggcggaggttgcagtgagccaagatcgtgccactgcactccagcctggcgacagagtgagaatcagtctcaaaaaataaataagaaataaatgaataaataagtggccacatattctccaaaaagtctcaagttgcattgactttccctcctattaacagcaccttaatttagaccttttctggtggctgtgaaatttgatcaaagggaaaagtgtcaggtgttactgtaccaaaggcagaagggtcaagctggcatttcattccgctgttcactttagcagtggataatgaatcttgctcaatgtataattaacacagggctgtagctaatggctaactctcccattttgtagatgaggaaacagactaaatggaggctgaagggacactgtacatggcctctgccaaagttaccctgcatcactaacttttgcctactccatacaaataaccagcagcccacaaacctagaatggaaaggtgtgtaagctgtatatggcctcctgtatcaatgaactattgcttctatgtaacaaaccaccctcaaatcctaaggcatacaatgatttattaccttcctgattctgtggtaggctggcagttcctctgctgggtgtgcctgggctcgatcttgcagctgcatccagctgaggcatcagctgagctggaaggtcccagatggctacctgacatgtctggcagacggtgctggctgttagctggaatgaccctcggggcctctcaaccttcagtagctagactgcctttcttccacagcattctcagggcaatttcctaagacagtggaggcagaagctgcctctcttggggccttaagcttcagaacttacataacatcacttttgccacattgttttagtcaaagcaagccccatggccagcctgtaccaaaaagtgggagaagagactccacctctaggtgggaaaagctgcaaagaatttgtgactgcatttaagctatcccacttatttatgagacggagtctggctctgttgcccaggctgcagtgcaatggtgtgatctcagctcactgcaaccttcacctcccaggttcaagcgattctcctgcctcagcctccagagcagctggaattacaggaacccacaaccacgcccagctaattttttgtatttttactagagatggggtttcaccatgttggccaggctggtcttgaacccctgacctcaggtgatacacccgcctgggcctcccaaagtgctgggattacagatgtgagcaccgcaccaggcaaccacctatttaaaactgcaacccgggccgggcacggtggctcatgcctataatcccagcactttgggaggccgaggcgggcggatcatgaggtcaggagatcgagaccatcctggctaacacggtgaaaccccgtctctactaaaactacaaaaaattagctgggcgcggtggcgggggcctgtagtcccagctactcaggaggctgaggcaagagaacggcgtgaacccgggaggtggagcttgcagtgagctgagatagcgccactgcactccagcctgggcgatagagcgagactctgtctcaaaaaaagaaaaaaagaaaaaaaaacaacaacaaaaaaactgcaacctggccaggcgcggtggctcacgcctgtaatcctagcactttgggaggccaaggtgggcagatcatgaggtcaggagatcgagaccatcctggccaacatggtgaaaccccgtctctactaaaaaaaaaaaaaatacaaaaattacctgggtgtggtggtgcgcgcctgtaatcccagctacttgggaggctgaggcaggagaatcgcttgaacccaggaggtggaggttgtagtgaattgagatagcggcactctgctccagcctggcgacagagcaagactccatttcaaaaaaaaagctgcaactctccccctcctgaagaacatcctagcctccttccctgctgtatttttctccctagtacttctcaccaactgatagactgtatgttttgcttatttaagaatggaagccccataagggcagagatctgtgctgcttagttcaccgctatagccctagcattgagaacagtatttggcacacagtagatgctcaatgatttgctgaaggaataaatgactaggtgctcttatgaccacgctgtatgaaggtgagtaaggcttgattcctgcccacttggagctctgtgttccagaaccagctcctaggcctacccagctgagaagtggacctgggtgaacccacagtgaccccaccaaagggcaactacaatgtggcccagggttgataatgattcatagcagggggtcagagaggaaagaattcaaaaattatttttcttgttatttatttatttattttttaaatggagtcttgctctgttgcccaggctggagtgcagtggcacaatctcggctcattgcaacctctgcctcctgggttgaagcaattctcctgcctcagcctcccaagtggctgggactacaggtgcacaccaccacacctggctaatttttgtagttttagtagagacagggtttcaccatgttggtcaggctggtcttgaactcctgaccttatgcgtgtcagtcacagagaccagccccgtttttgtaaaagagacttttttttttgagatggagtctcactctgttgtccaggccagggtgcaatggcatgatctcggctcactgcaacctctgcctcccaggttcaagcaattctcctgtctcagcctcctgagtagctgggattacaggtgcatgccaccacacccagctaattttttgtattgtagtagagatggagtttcaccatgttgcctaggctggtctcgaactcctgaacttgggtgacccacccgccttggcctcccaaagtgccaggattacaggcatgagccactgcaaccggccttgtaaaacagacttctaaagagcagttttaggttcacagcaaaactaagcagaaagcagagttccctatatacccatggccgccgtatctccctagtctcccctgccatcaacatcctccactagagtggtacatctgttacaactgatgaccctgcattgacacatcatcatccaaagtacatagtttacaccagggttcactcttggtgttgaacgttctatgggatttttttttctttatttttcccagcccagaacccctctatgggttttgacaaatatataatgatatgtatccaccattatatcatgcagaatagttttgctgccctaaaaactctctgtgccctatctactcatccttcccacccctcaacccctggcaaccattgatatttttactgtttccacagttttgccttttttagaatgtcatataatacagtatgtagccttttcagtttagcttgtctcagtccgttttgtgctgctaagacagaataccatagactaggtaatttataatgcacagaaatttattggctcgtgggactgaaggctgggaagcccaagatcgaggagctggcatttggtgaggaccttcttgcttcatcaacccagaggccgggcaaagagagggtgggaaggcaaacttcttttataagaaaactacttgctctataatgaacccactcctttgagaatggcattaatgcatttatgagggtagtggccccatgacccaaacacttcccactaggtcccatctccaagaccaccacattggggatcaagtttctaacacatgaactttaggggacacattcaaaccatagcagtagtatgcattttcacttagtaatatacattgaagattcttctgtgtttttttcatgacttggtagttcatttcttccttttcacagacttaatttttcagagcagttttagattcacgcaaaactgagcacaaagtacagagagctcccacatactctctgccctcccaactgcacagcttcccctgaacaagagttgtgcacttgttataactgatgaaaaggtccactttattttttcttgtgctgtgttgtccaggctagggtacagtagcacaatcatagctcactgcaaccttgaactcctgagctcaagtgatcctcctgcctcagcctaccaagtaactaggactataggtgctatcatgcctgccttgttttagtttactttttgtagagatgaggtctcacaatatcgcccagactagtttctaactattggcctcaagtgatcctcccaccttggcctcccaagggaagcctgggattacaggcatgagcaaccatacccagccttttgcccatttttaagtgagttgtttgttgttgtcgagtggtaggagtctaaattttattttggatagcaattccttattagatatctgatttgcaatattttctcccattccacagattgcctttcattctgttgtttcctttgctgtgcagtttttataaagtctgacttggtcctatttgtctattcttgcttttggggtcatatctaaaaaaatcattgccacatctaatgttgtagacctttccccctgttttctttcaggatttttatagttacaggtcttatgtttatgtcctgaatccattttgaggtaatttttgtatatggtgctaggttagggtccaacttcattcttttgcatgtggatatgcggtttttccagcatcattagttgagtccagagatccgcctgcttcggcctcccaaagtgctggaattacaggcgtgagccaccgcgcctggccgagtccagagagtttttaaaagcatagagaggaggccagacacggtggctcatgcctgtaatcccagcactttaggaggctgaggcgggtggatcacctgaggtaaggagtttgagatcagcctggtcaacatgatgaaaccctatctctactaaaaatacaaaaaattagccgggagtggtggcaggtgcctgtaatcccagctacttgggaggctgaggcaggagaattgcttggatccgggaggtggaggttggagtgagccgagatcgtgccattgcactccagcctgggcagagcaagactctgtctccagaaaaaaaaatctgcacacaaataaggcttaatttggcagtggtggtggcagggtggctgtccccagcgagcatgagccctgccctgagataagggcttctcttcccccacccatgcagactcacctctctcctggaacagatgctgtggccacaggccaaacaagaacagggggacctaattcccccctttatttaatttaaagaaaataaaagatttaccaaaaaagtatacagtatcctaataggcactcgtgttcccacctctgcctcttccatagactagaaacaaaacaatgccaattaagttaaagtcccctttgtcccccatccccagtcccaggctccctctctgtttttccagtaaattttcacgtgtgtttctgggctctgcctaagctgacaatcagtcctttgaatccgcatggttccttttcatcgtgacctactgttccgcggtatgagagaccacatgattctgccattcgggtcgccatgtcatccctgggggcctctcctagcgtgcccacctcggctcctccggggcaaggtcatccaggctacacagatgctcagggtcctccttgccaggggctgcaaggggagcgagctgaacccgaggaaggtcgtgcttcgtgcagggccagcgagggaaggtcacctcccggcgccccgagcctggccccatgccccaggctccccgcgtcttcctcggagcgctggccccgtcccagtccccgcccccggccgcgccgcccttcttggcttgcgccctggtccccaccaaccccgcccgagcccccacggaccctgcccggcccgacggaaatgacccggccagggtcacacacggcccctgcccgctccgctgcggccatctccgcttccgcttccgcttccgccgaggcttctttccgactcaggcacggctctgtgccgtagctttcgaccccaccgccaggccgctgcccgctctaggcgtgggctgggtctcggggcatcgctcgcggcgggcgcggggcgagagaggagggaggagggccgggcttctcaagacgccggttcgggtcccgcaggcggcgggcgcgggacctgcccctgaccgggcgggagcggtgctcgcagagtcaagcccgggcttgcgggtggggcttgcgggggcgggaccgggggcggggccgaggccgcagctcccagccggtaccacctcccctccactgagagattccaccggtccctgggctgtcaggcgcggtggccaagtggtaaggcgtcggtctcgtaaaccgaagatcgcgggttcgaaccccgtccgtgcctgagacccgaggtagggctttggctgtggggaagtcgggttttctccacgtacgccgtcccttctacgtggcattttttccattttcggattctgctcagtcgccctccagttcgtctcctgccccgggctccgcggtcggcgggggccggtgcacctgggcttcgagactccagggtccaccttacaggtgagctcggcccccgccgcgccgcgtgcgccctcgccgccggtccccgcgtctcctttcccccagccgcatttcgcagagccggagtcgtcttcactgcttcgccaatggggacactaaggtccaggtggcccgcggggactcgggtcccgcccgatttgcgagtgttatggcggggcaactttccagagagggtgcctgagtttcccgaacggtggtttctggattgttctttggaaggtgaattatgcaggccatgcgcactgcctgtcttcctgtctacaaagcaaaccagattgttcaactggtgggtgcttcttttccagtcctggtgaactgatcctttgaatctgcccccagccagttatgacactccccacatcatctctaggataaacagtctgatttaacatattaataacatgacattgagcgcctcctcccattcctggaccctctttttgatacactgctctgtctgtcctcctcttcaattgtaacactccctaccgaacatactactccagacagagtcttatgaatggaacttcacctccctcattctataccccatacttctgttaatgtagccctgaaaaaccacattactttctctgaggcctgttgcacagatgaccatgaggagctttaggtggactgaatgtcagaagagtctcaggttatcagaagagaaggtatagggcccaggcagcagagaaatattgaccttttctctaagatcccaataaatggaagagacgctcttggcttttgaaggtaatgccgagctagggtgtcagtgtcatcatgaaagtgttattaaatacaaattgaggccttttttgacaagcgcctcagcctaaacagagtccagatattcaggcatagaaataggaaggtgaaaagtcctgctctactggatattgccttgaatcctgtcccttcaaattcctgatgagaaggagcttcaagactgaacattgtgttttccgttttttttttttttttttttttttttgagacggagtctcgctctgtggcccaggctggagtgcagtggcgcgatctcggctcactgcaagctccgcctcctgggttcacgccattctcctgcctcagcctcccgagtagctgggactacaggcgcccgccaccatgcccggctaactttttttgtattttttagtggagacggggtttcaccgtgttagccaggatggtctccatctcctaacctcgtgatccacccacctcggcctcccaaagtgctgggattacaggcatgagccaccgtgcccggccaaacattgggttttctgaaggagctggagcagagaattccaccccagcggagggcagagggacaagccaagccgaagtcaatataagagaaatgcaaggggccgggtgcagtggctcacacctgtaatcctagcactttgggaggccaaggtggatggatcacttgaggtcaggtgtttgagaccagcctgggcaacacagcaaaatcccatctctataaaaaatacaaaaactgccagccgcagtggctcacgcctgtaatcccagcacttcgggaggctgaggcaggcagatcacttgaggtcaggagtttgagaccagcctggccaacatggcgaaaccctgtctctatttaaaatacaaaaaaattagcgggcatggtggcacatgcctgtagtcccaactgctctggaggctgaggtgggagaatcgcttgagcccagagggtcgagtttgcagtaagctgagatggtgccactgcactccagcctgagagacaatgagaaactgtctcaaaaaaaagtgcaaggtacagaagaggtcagtgtaaagattttggggaaacatgggcttccaaaagtgaaggaccagaggcaggggtcaagtatggattccaggtcaagttttgtgagaggaactagaagtgaaggcaagtcagatacaagcaccagggtgagcctggggaacagaaatcttgtaattaccttgaaggccagcaggtatctacatgcacccctgtggagccaggggtaggtcattggcttaaagaataaggacagaattgaaggcaggggcagaaagggacacatatgttgagtttgttgcatgacctccattaaatcgctgatactccctggacttcagcttccttagttgtaaaattctacagttgaaagagctatgtcctaaatgccttgtgtcctgaaattctaggtttctacctcagagcctggaccttgcagaagcaaggggatcacaggccaccccacccatcatagtagccccttctgcaatggggcttgaccattgcaacctcatgatgagatgtgaccagggctcctccatccagggagttataagcagtcctccctgatgggaagcgctggagctgcaaaggctccgcccatgctggttacccctggtagagtcctcccttttgctcctccttagtgtccagggcaaaacatagggcctctggtactgcattttgagagccacgcaggcagacacagtcatttgtgggcagctaaaacctccaggatattttttaaaacatagaccagaatttggcaagtctatatattatgcctcattctataagttttagcccaataccagcctggagaaatatgcttttttttttgttgttttttttttttgagacggagtttcactcttgtcacccaggctggagtgcagtggtgcgatcttggctcactacaacctccgcctcctgggttcaagcagttcttctccctcagcctcccgagtagctgggattacaggcacttgccaccatgcccggctaatttttgtatttttaatagagacagggtttcaccatgttggccaggctggtctcgaactcctaacctcgtgatctgcctgcctcagcctcccaaagtgctgggattacaggcgtgagccaccgtgcccagcccaagaaatatgtttttaagtcttttaccatacaataaaacaaatttgaaaaccacacaaatcaagtgaatgccttaatgaattataaggggaacactatccaaattagagaattttgccggataccccagaaaccctttttgtgtgtccccccctaatcacaacctccccagggccataagtatccttaccctctaatcacttccttgcattttagtttatcacctaattgagcatcgcgacatctttgtacactatagtttaactttgctcatttaaaaaaatggatagaagctttttttttcaatcaggaggtaccccttccttccctttcatttcctggcagtgtgtctgttgaggaccctgggccactgcacctggagggtttcccacagtctagatcttgcttactgcaaactcttggtgcaacccagtaagctcctcagtcctcagtacttcctgcaaatcaaattggcagttagatccagacgctggatcggagtcaggttggttgcctgtggcgagactctggtattacctcctctgagaagcctctgattcccccaggtaaggagtccctcagtttcttgtctgggacccctctgtgtgtctcacaccatacttggaagccccttaggacttggatggtgtctcactcatgtctgtgtttccagcagctggaacagagacagagccttggcacaaggaaggtcctgacctgaagggctaaggaagacttccctgaggagtgacattgtggctgggctctgcaggatgaatacgaactcaccagagcacaaccaggtcttgggtatctctgccctcattcagtcatctttgacactcaaatatcatgatctaggttgcatctaagcaggcaggggttcttttctttccgcagtggcctctctaacctgcaggtaaaatcaatttttgaattaagaaacaaattctcattccctgtagatggttttattagcaaaccccaaaggtctaaccccatacttggggacaaatttaccaatttggaataatacactgatagaaatgaaaccagccaaccctctcatttcacactgcagaaacaggcaaagagaaggaaagtgattgttctaggtcacccagaaagctctacttttatcatagatattatgcttgtctacagcatgagctcaaatcttctaggaaaagtcatcttcattattaacttgacatgcacccaggagatggtctatctctttgccagcctgtaggccaaactggcacctcacttgtcaaacactcatgcctgatcgataggaacagcagatggtgaccaaaatcactatacttgattacaatattaaggctttaggggcaagagagggacacagatatacactgtcaaaggttggaatccccagaaggcagacccctagacagagcttaatgtgcagaatgcttattccacctgggaaagggtgggaagcaggtgtgaaatgagggagagcccccctcccccaccactcactggatgtgggctgtccagagagcttagactaggcggctctaatggcagaagacagtctgttgacagcactccaagcagctgggacaaaccctttcttgaaggggtaacatggcacagtgaccatcacacacagagtgggaacttaaagacaagaatcaattcagtcacagagagtgagggcaaagataaagctcataggccaaaggcttaacttctggatcaagggctctaatattttccagacatgggctttggctactgaaagcatttcaaagaacactgagtaagagggctgggacctggggccagtagggatcactgtgtgacctcacttcccaggagtcatcctcagcatcacgtgcagaaggccagcctgggtagggagcctcaggtcacctgcctcctccccagaccccatcatccaggaaaactgaattcagctgaaagcacagccatggcattgctgaaatatgacaacacctggagacaatggattcctttctggggaatttacccctctgctgctgcttgagggcaagcgtcctgtcttctcttcccctggtatataaaatgaggctcttcatttgttggctgaatgaatgaaggtcagaaaaagaaaactcaacttctcatcctccagtaatggaacaatcaagttgggagaaatcacagagaaaaaaatcacgtcccaattttgctgatgaggaaactgaacttcagaggcaggaaataactctcagaaggttgcagagaaggtgaggaatcgaaacaggccataagcagtgacaagtctggtaatgccagagtagtttttctgcagtaaagatttcccttcctgcttgcctttcccctgattctggggctctcccttggtccagatcatttgggccgagagaaacaaaacccaggtgcattgccatctaagcagaatatgctgagaaaatcaccctcacaaattccatagtcacctacaaagtacttcaggttatcaccagcccttttctccctctggtccccaggatgcgtatgtcttctctcagaactctttctgggccgggtgcagtggcttacacctgtaattccagcacttagggaggctgaggcaggaggatcacccgaggtcaggtttcactaacatggtgaaaccccgtctctaccaaaaatacaaaaattagctgggcatggtggcgggcgcctgtaatcccagctactagggagcctgaggcaggaacctgggaggcggaggttgcagtgagccgagattacgccaatgcactccagtctgggcaacacagtgaggctctgtctcaaataaataaataaataaataaataaaaataacagagagatgttaatatcatcatcatcatggtatgttcttgaagttctcaaacagcaggaggtaaccctgttaagtgaaaccaatttaacagcttgtaaacagcattctaaaaatgaaacggtaacacagaatatatatttgagtgcataagaattgtttcataaaacatttgttttacacatgtacatagatacatacacatatatacatacgtacacacacaggtatttcctatcatggggcatgactgagtttgaaagctactgttctaaggcaacatttctctaaagatgattgaaaggagtgtttttctttcttttctttttttttttttttaatttttgagacagggtctcactctgttgctcaagctagggtgcagtggtatgatcacagctcactgcagcctcaacctcctgagctcaagtgatcctcccacctcagcctcccgagtagctgagactacaggtgcgcggcaccacgcttagctaattttttttgtttgtttttgtttttgtagagacatggtttcgtcaggttgcctagactggtcttgaactcctgagctcaagcaatctgcctgccttggcctcccaaagtgcttgtggcttacaagcctgagccactgcgcctggtctatttttctaactttagtaatttgcatttgcataccactgccattattgttgtcatatcagaatactacctataacattatttactaaattcttgtctttgagttggctcactttaaccatttttgcctcattgtaacagcaatattcagaaaatttatatttaatactacatattacatttttttccatctaaaaccatctctcatatgagcaccaccttttgggaaacgctggtggcaaggagtgtcacatgcaaaagccccttccagaagtcaagctgggagccagaaaagctgtatgatgttgggatgttgggtgagcccccaccccctgcccccggggtccttctctgcccctggaggcaggcccagtcctgctgctgggtatcccaagttcttgtggttgaccttcccgcagtggccacctcaggaagaaaagggcaggccctatctgcctgtggactggatctttcttgggatgttcccgccagtggaaaaggccaggacctcgatctgcctttctgtagtgagctgcatcctgctgctgccccaagatcgaagaatttcctttcttgtccagctttgattccattgatgggattaggcaccccccacggccgtgtcctttgatgtggtcagggggtagcagggagatttcaggcccagggagcaaatcttaatcttcttcgagcttctctgggatcagcaccggggtaaacccattacaaccctgccctttcatccccccaggacaccggctcctcccggctcctgagtctcagagatcctaagggtttgtcagatttggagcgagcaataaaaggggaagagaaagcagaacactaactccagaccccctccagccccggctgcatctccagcaacgtcagggcatcttctttcttcccttctaatcctgcgctcccacaaaatggcgattacagaggcctggggccagcgctgtccatgccccagcactgggcatctctgccagcgcttggccgccatccctcccccagctacgcactcctgggagcaccagctcctggacatgtcctacccagggatcccgatgtggggatcagataaaccagatataccactcaacccttaccaaagtgaagtttagagacagggtctccctctgtcacgcaggctggagtgccgtggtgcgatcataattcactgtagcctctaactcctgggcttcagcgatcctcccacctcaggtgtgtgccaccacgcccagctaattttttttttttttttaactttttgtaaagacagagtctcactatgttcccaggctggtctcaaactcctgggctcaagcaatcctgccttggcctcccaaagtgctgggattacaggtgtgcgccaccgtgcccagcctcatagtgagatttaaaggcatgatctgggttggtgaggccaggaaagagaaggcaggaacatagctaatatctatgtcgggacacaaacagatatgtcacgttattttctttaaatggctccaaatctcgacctgaagaggttgggaaactcaacctcagtggttatttgggcttccccatcacccacggtgcctggaatcctggccatcttgaggctggggatcttggtagaggcctggttcaggtcccagaggagacacgcagttactctcccacatcctggcgtctccggagagacagtggggcagcaggtctccaccaaggggattccactgacctcccacccctcgctaatcttgggacagctcttactcagcctcaaagcttttctgtcccactccttttccacagtctccctaaaggaactcagcttttcaaacagcacagccaggaagagaggttgtctgcaggccgctggaactgggagttgaaagcacgaaattttaacatctcaagaaagtatgctgcccggtactatgcttggcactttaatttataatctttgccaccaaagccctgccagaagtgcccggcggctccaggttctagatggggaagttgaggccggcggcaggcgcgctccaccgggcgggggcgcggcccgggagcggagcggccggcagggggctccccgcgccggtctccgcgggaggaagcgctggcagctgctcggacgggtcaaaggaggaaaagggaaaattactgggctccggggcgggaaggactgcgtgactgggaggaaggcactccagactgtcgagtagggccgcccgcgtcgggaccccatccccggggcagtgcgggccacccgggacctgggaacccgggccaccccccaccgccgtcagggtctctcccgccggtgccgcaggctggagcgggcgtcgcggccgggggcggtgccgcctaggggcgggcgaagggcgggccggggcggggcgccgtccgctcggctccgggaggcggtgcgggcgggcgctggccgcgtccgcccgccgggagccgcggggcgcgcagccttcctgatgtgtcaccagcacgtggagccaggtcgggccgcggcgagcaagccgacccccccaactttcgaggggtctcgccgccccgctcctctcccggcttcgtcgggctcgctctcctagcggagggggcggcggcggcccccaggtcccgggcaggtcgagcgaggccacggcccccggccaggagttcgaggggctcccggaacgtcggggcgcgggccccggctagcggctatggcccccgtgcccaggcagcggtgcgggctcggccttgcgggagggtgcggcctgctgcgagaggtcggccacggctcctgccccgcgccccgcgcccctcgcccgccgagctgagcgcaggtaaccgaggcagagcggagctgggcctcgcaggcgcggcgtgggagcgtggcgaagtttctcggcgcataactcttgcgccccactcgggagtggggctgcggtggggaggctttggtccccgcacctccccctcccccagcgctgtccctcggcctgagccgaggcggcccgggggtggcgtggaggccgccgagcgtcgtgtaacccttggagggctgggtttggagcccgcgacccgaggtcgggcggggcggtggactttcccggggaacgccgcctgagggacacccagagcttcggcggagcggagcgcggtgcacagagccggcgaccggacccagccccgggaagcccgtcggggacgcaccccgaactccgaggatgggagctgagggctgggtctttgcgggcgagatgagggtgtcggatcaactggcctacaaagtcccagttctcggcccccgggaccagcgtcttctccccggtcctcgccccaggccggcttcctcccgggctggcgtgcgctccggccaggctgcctctcaggtccacgctggagaaggagtggtgaggtgcgctcgccccggctgcgtgcggtgattcgggaaatccccgcacttcgctggagaaatagcgacgctctcggaagtgtgagtcggtcactgcttggggtccgtaccctttgggcagacgtggaccgcgccccggcgacctgggttgagtggacagacgggacccggcttacccatgggccaagccctgccacttaccgaggcctgccctgctgtgctttccagggcggcaaccttgagcttgggggtggggagaacggggcctgacttctagaattgcccctggggaggtgggaagcggaggtttggcccggtggcgcaggaagcccctgttcctctcccaaacaccatttcattaaagatggatctttgtggatgtgttcccaatggccggtcttttgttccctgaccgatgcaacataatgtggacccactctagtcctcttcaagttttttgctggaattccttaaactctcctttaaagtctcttatctattcctctagtgcgtttgcttctactccccgaaaacaaaaacccaccaacccctgaaacctcgggtttgcctggtgttggaactttggttatttgtcctttgtttgtgttgtgtttttggctcttggccgtggaaaaacatctggggacatgcagtgaggtgacttgaactgtgtgaagaactggttgacaaaatagggaacgtctggtccctgtcttacttggctttggaaaacaggagaggtttttaggagctgggaggagggagggtgagagggaggaaccatcacggccaggttggcccaccccttgccaggtcgtgtaaaaacccattcaagaggcattttcccacaggctccctgcctctgcaggccacgtgtagagtagtcctttgcaggcgtcctgcccatactgttgtccctgttttgggggcatgtgggagccaacacaggggagtcaggtgtgtggtaggcagtcaggtgtgttttggggtcagggaggcaggtttgggcctgggaggccaggaagggacataccccgtcctgcagttggcctgacttttgtccatgttagctttgtcctggaggcttacccagtggaacatgcagatgtcagaattatgggagaaaagagtttggccatggggtagatttctgaacatcttgacaaattcttagtttggagacaaaattgtctaggagtggaactgatgggagcttcaactggagacctcgcccctaattaagaaaaatgctctttggagcgctgaatcagcttgggaaaacaaagttctccctttgaaccaatgcctctcccagccctggggatcagtgtctaaaagtaaatgaagtggaaatctccagaatattgcgtggtcataaaacatcccagaagtgggctggagcaatgagatgccgaaaagcaggcctggctggctgccctgcacccaccctggaggggaccggctggggaaggtggactcacagggctgggaatgaggcctgaggagcactgtggtgcccccggcagtttccctcaggctgtgccccattctttctgggtctggccagggctttagagatttttaggaaatgacttggtgcttcgtttctttgggggaagtgagtgattaggtttttccttcttgggtttttttcctttgcaaaatgtgattgaatcagctatgcagtaggctgggctagcctggcctcctgcaactgatttatgcttccgtgtaagccgttgtattgaggaattgtgttgtagtggagagctttttgattttgctctctcttgaattcatagtttcctggagcagaggcctccttcctggctcctacccccacccccagtccctctttcaaagatgggtacctcaaggtttcaaggggaagtagcttgaacatagactgatttaccctggagccttcttcaggaagcagctaaatgcaaggtagaaagctggtaggagggggagggttttagcgagacctgcagggagactgacggaagactcctaaaaatccagctggactccctgtcctgcctactgggaagaaacttgcattccctcaactcttaggtaaattgcagactggtgaataattaaccttgcctttttggctttttttttttttttttgaaaaagaaaaatcccaacctatgaaagattgaagatcagtttttgtccagcaggatcggaatgacaaaggaagtattgggagaagccagtcctctcatcttcactcctagcaactctggaagttctgaacctcagaagaaatccctccggggttttgttggtggccatccctgccgagcccctggctgcttccctgggtttcctttggttcctctttgcccaaagctgagctgtctgaatggtgaggattctctcctccactttgtctagcaacagcttggcccttgatactgcaggaggagttaattccgctgctgggccagtctacagccctctgcgcgggctggtaaatatttggccagtctcagttctttttacacaaaagaacagcactcctaatctgtgataagtccctgaaagagagttgtctcagaagcaagggatcattttggtttccgtgaagggtttttttcttgaagcagcccagtgtgaaggccatggaggcgcactttgcgtccagatgtgcttgggttccaactgcggctcaccagctgcatggctttggcccagtgacttctctgtgccccagtttcttctcttgcgggatgagggttatgatacctaccttgtaagtgtgtggcgaagcttacgaaagatgtatgtcagggtgtctggcacaaaccagtagatctccgactggtagtctttgtcccctggctcttttttttttaataaagattttcaaattattattttatttctttttcttttctttcttttttttttctgggacagattctcactctattgcccatgttggagtgcagtggcacgatctcagctcactgcagtctccacctcccatgttcaagcgattctcctgcctcagcctcccgagtagctgtgattacaggtgcctaccaccacagccggctaacttttgtatttttaatagagatggggtttcaccatgttggccaggctggtctcgaactcctgacctcaaatgatctgcctgcctcagcctcccaaagtgctaggattacaggtgtgagccactgtgctcggcttgtttatttttcttttttttttcttttttctttctttctttttttttttcttttttctttctttctttttttttttttttttgagacagattctcactctgtcatccaggtggagtgcagtggtatggtctctgctcactgaaacctctgcctcttgggttcaagtgattctcctgcctcagtgggattacaggcgtgtaccaccatgcccagctaattttttgtatttttagtagagatggggttttaacatgttgccaggctggtcttgaactcttggcctcaagtgatcccccaaccttggcctcccaaagtattgtgattataggtgtgaaataccacgccctgccttaaattattattttaaattaaaaaaatgatgtttagatgccacgatgtaggtggcagtaccttaactatatgcgtgtcgtcaggcccaagggcctcttccatccttgtcaaggggagtgctaaccttctctcctttcatacaatccagctctcttattttgaatctgcgtgtatatacatgttggttgagaccggtgcagagtgattgagactcgggcttgtgggtctggtaggttcgaggactaactccatcgcttgggagcatgtggccttgggcaagttacttaatccactgggaacaggggtatcgtaaccatcagatggggatactgtctgggattcccatcccctatatgggtctcaatcctctcagtttctgtggtctaacaactatgtgccagggactgggccaggcagaggctggggtatccgttagtaagatgggcacggtccctcgctgcctgctctgatttttgccccagctctgagagcagattaatggtattgtaagtcctcattgtatggttgaagtcgagactcaggggaagagaccctcccagaatctcccagcttgcctcggtaccataggagcaggacccccaggcttccaggtgcagcctcccaggtcggaagccagcaagctggggctgtagaacaggaggtggctgggcctggattcgctggcactgagtccttaaaggaaccctgggtagcagatgtggccgccttgtacatctgctcagcagtgcatcactcctaaaggcccaaagactcgtccggtcctgacactgagcacgtttcagaaaaggtcccaggaaagacatttgaattgccacagctgctcaaggcttgctccctcactcatgctgtgggcaaactaaacatcctctagtgggaccaggcaagcaggggacaaaatggaatgggggtgcgggggaggagaaaataatttgatattccaaaaaatgctgcagagtaatcattttgggggtgaaaatcagaatttcttgggacttagacttttttatggctcagtggtgtttttctttagaattttggactggaggtagggatagaccataatcttttcagcacccaagagccttcagcaggcctcactggctctgggcagggggcagggcttacaggacccagagcaggtgacatcttacccactgtggatacttcctccctcctccctttggcacggtctgaggaattttgaaatcaccccatagccagaccccttgcatttgctgcccaggagaaccgggcagggaggtgccatgcggaaagtcccgctgcctgattttcctctgagctcatcactgcagcctgagagcccccttctctgtcaagtgggtgactgaactgaatacaccagaccccccttggcattcttctaagatcctaaggaggaggagctgaggaaggcacggggtggagcctggggctgtggtttggaggatgggagggctgggggagggattcagagattgcagctgggaaatttggatcggcctatgaagactttgtggttcattctcatgaaactcgcttcctctcactggatttctgccctgggggatgtggggttcaagtgaaaacactggcttttccttcttggtgactgaggcttaaattctggtctcccaagcaaatatttaagaaataactctcttttccctccttgtccattgtaaaacaaaccctctttttcgcccatgtctcccaccctcctgaaaagaattcggttgtcttgctgcttactagctggtagcacctggctttccagcaggctggttgaaaacagaaaatgcttctctgcttaagacagggaaagggcgtgggctttggcatcagaaacctggctttcctgtagactagctgtgtcgggcctggggcgtcttcccaagactcaatttccctgtctgtgataatacgtgcctacttctcagggcattataaggactgaacaagaatgtctgtgtgaaacaccaggcgcatggtcgggggtggtacatggtagttcttcccgggtgacaccatattcatcccagggtccatgggacaatgaggtcaaagaaggaccagctgaggctggtgtgcctgcttgctggcttagtatctggggagaaaacactggaagaaaagcaaatccttgctggtggggtgtgggggtgagtttgtgtgggtcctgcctcttcagtgagacatgtctaccacttgggaggggcgtagggtggaggtggggggccaggagtcacagccttttccgggggttgggttcatgcggccgccacttaagcctatctgaggggagaggttagtgggagagtcaggatgagtttctgctgaattccttcttgtcaagcttgcttttgtgggcttaacatgagaagggtggggagggggccatatcttaaaaaagagaaaggctgggttcagtggctcgcgactataatcccaacacattaggaggctgaagtgggaggatcagctgaggccaggagttcagaccagcctggccaacataacaaaatctcatctctacaaaaataaaaaataaattagctgggtgtggtggcttacacctgtagtttcagctactctggaggcaggggcgagacaggattgcttgagccaggagtttgaggctgtagtgagctatggtcacaccactgtactccagcctgggcaacatagtaagaccctgcctctgaaaaagtaaaaggaaaaattagtcaggcatggtggtgtgtgcctgtagtcccagctactcaggaggctgaggtgggaagatcgcttgagcccaggagttcaaggttacgatgagctgtgattgactgggtcactgcactccagcctgggcaatagaggaagaccctgtctctcttgaaaagtgtctttgcttttgaaacttcgagggcgattaaacagatactgaagtacaagcaaaatgttagtcttcaacttgcccagccagaccactgtgtatctgggaaaagtcaactagactgcttgctccagctggttggtctggttggtgtggagggtgaaccctcctctggcccgaggcgtacaccctctctcctccttctgtgtctggtgatggcaaacgtttatctttgctcaggcctgggtgcacgctaacctcggccaaatctctgaatgttcaaacatctgccaaaataccacatttcgacaatgggccttctctatagagatgaggttacgggggcagtactgggatgctggaaaaccacttaaactaaactgcgggaaggggcagggtccaggatcctgactttgagtgtaaggggtggggaaggagcagggggcagctccttgccatacagagaggcctgaggaccagctccctgcttccagagccggagcggggagggggctgctgccaacctatcttggcattctccctttcgtccttggggtagatttcgttgtaattagacaagttgtgacaaatagcccattggtctttgggctggagaattgtgccgagtcctgcctggaaacccagccttgttcacttgggagccataattaggcaagagaacagttcatgagccctttgattcaataaagacccttttatgatgttggtttttcccagaaaaatcataccactttgctccatgtattgcatttagatgtgtaatcatattagagctaagcagcccaggggactgaagttgtgtagctggggttgtaggggcagaaaggtgcaatccctttcctccccgtaagggtcacggctgacatttctgtaacaaagacaggttaacaggagaaaagtttgacaaatttatttaatcagtgttttacatgacatgagagccttcagaagtaagacccagagaaccagggaaaactatttttatgcttagattggaggaagaagggacaaccatctaggaatgtgataggacaaaaagggtacgacctaatgtaatagacagaggggaccacccagcaaggcctgtctattcagatgctttttggcctcactgtgcagcatgtctggggcgtatggggcaggacccctttgggatgaggggtgagaagggagagagtgacctttgtagatactatgtcttgctttgggggagaggagttctacttcctatgacccaccttggggaagaggaattctggtttctgtgcctggctgctggggagaaagaggggcaagagacagaagggtggaagaaggtcagagagaacttgctttctcctttagttcaaagtgctcagtgtaccaaagcgccaggctctggggtattgtgttctcagccccatggcgtaaagcctgttacccggtcttcagagaaaaacagtgtcctcagaaaaaaagaaaatgacaaggaacacttctaaagattttctctcttgtcatctaaagaacattttctcccttcagagtgagaagtgacccagggggaaaaaccagaaagtgaaactaacttgacaggccagtggcagcggcagcccctggtgcctgccctctgcagtcctgtgtcggcccaggccacgcgtgcccagcatggtcgatatttgtcagacggatagcacgtgtccagccaagggccagagaaaatgcccccagaggatgcttgcatcctttccacaaagagttgtggtcagcccactggggtctccaccggggtggcagggctgcagatgctggtgtgtgcaggtggcagttctcggcctcctcctcattgcctccctgtgaggggcagtcagccctgactacatatagccctggagcttgcgggcagctttcagctcgttgggaaggtgtgctgggcctgcgacattgaccggacagttcttccaggcatgagagggatgccctgcccaggtcgctgtcacaggcacaccccctcccaccagccaccctcttgccttcttaccccaagaccatgttgtcaggcaggccaaaagcatttcccaatcatggagtcagatgtgtcccagaaatctgccctgtgcccaggagaggtcgaaatcgccagtggaatcaagaacctctttcccaatttggggtttagaaatctctggcaatgaggaaatttctggtagtcatttgtaagagttactctattaagaaatagagatagagggtatgacatttcagaatgctaaaattttgttgcattagaaagggggaaaatccgtttacttcccaaacatctggtgggagttatcaccaaaatatattttcagatatcctctaatgcagaaaaactgtattttataggacgtggtttatctgtttgtagataatgtgattaaaatacttctgcagtgtcgctactatcttaaggtgactctttttaaccttcatactgtaggctttttaaaaacacatagagatgggggtctcaccgtgttgcccaggctggtctcgaactcctgggctcaagcaatccttccacctgatcctcctaaagtgctaggattacaggtgtgagccaccatgcatggcctacttaggctttttggaagatactttacactttttggaagaagtgctatttcttctggatactttacactttttggaagaagggctattaagttatatatatgtatacattgcttccccccccgccccgccaaaggagtataattagagcatctgaaaccagattatccaattagtacatttttctaattagctgttaggatttcgtgatgagataaattattttagatttccaagtggaactttggccacagggaggctctaaggaagtacacaggggagaaaaataatgggtttttaaagttttgactccacccactcacctgctcccccaaaaacctaatgtgcctgcccatgaggcagcaacagtgaccagaaaacagtttcttttccttgttctgagtaaatggagttggaagaattattcatttatattggcttttctttgttcctggtaatgaagcaggcagacaggggttggctttaaatgctattttttctacattttcatcagtcatattagtagctgttctttggcagaaaaaaaaatctggtgatcaggattaattcagaacctatttactgtgagccttgtatgtgctttctctgtgccaggtggcaatgaagaccgtctgtcagggggatcggggggatgtcctgtcaagacccaggggatgaagtcaggacccagcttttgcattttgtaactgtggttgatgcaggcccaccatcctttgtccaaaattctggatacgcaagaaaactggatactgaacgttgtttttgccgctaattgaatgggaagacctgacccaaactgacagactattggagtccatatttatcctggggagtgtgaatactcatgggtttccctgcagagatattaatgtttgattatgggtgctgccttgctggggtgttacataatatgtggcataggcaccacattccctttctaaaacttgaaaagttctggaacacatggcctgaaggtttggagtaagagaccctgccctggagtagcgtccacttaagactacagcagccgtgtgctcagagtccctgctctgccagggcccgtttccacttcagccataggaggagcctgaaggcagattgagagtccagctgaccagtgggtgagatgcccaaacagctgtaccgccaccagggcaggtgacttggctgccccatgaccctcagaggccttccctcaccaggtgccaagcaaagattgttcagaagcagattctgttctgctgtcattgtgaatacatcaatgaatgagtacatctatgttctaataaaactttatgagggccaggtgcggtggctcacacctgtaattccagcactttgggaggccgagatgggcagatcactgaaggtccagagtttgagaccagcctggccaacatggtgaaaccctgtctttattaaaaatacaaaaagtagctggacatgatggcgggtgcctgtaatctcagctatttgggaggctgaggcaggagaatcacttgaacccaggaggtggaggttgcagtgagctgagtttgtgccgccgcactccagcctgggtgacagagtgagactctgtctcaaaaaaaaaaaaaaaacccaaaaaacaaaactttatgaaaacagatggtgggctgggatggccctttggccagagtttgctgatgccttgtcaaaacgataaatgcatccttaaacatactgttttcttccacagactttagccctgccatctgcctgcctggtctgcttgtcttgttccccacccctggccaagtggagttgccttaaagagataaaagttgtgcctctagtgtcagtacccaccccttgcttggctcctccagatggtctggaaacatagatggaaagcaggcgctgccctcaccgacctggcctcggtagcaggagtgtgtttttgtgtggacaactgcagttgggcccaggtccagccttgctgacggctactcacttgggcctccacccactgatgaattttgggggcagagccaagccccaagatatgttggctggcagcctggggccaggcagggctgctgttgtgggagcccagtcccaggtgggtttgtgaggtgtacggggagtgaggggttgagaatgagtgttttcagagctgatgtgttcttagcaaaagaatttctggcagagagaggttgattatcgtaaacccagcggctctgatggatgagtttcaggtctcctggcttgttcattcccagcctcggaatgtccagcaagggcggggccagcctgcgaggccaagacctcttttcactgcatcagaagtttaaatccagttgagccctctgacttgcacctctgtagtggtctggcctggggaagactggctggggtggacagaaggagggcgggaccctcagagcccactcttctagtctgtgtgctggaatcacccctgtcctccccaacctccaaccccgtcaagctgcaccaaggatgtttggcctctgactcaaagaaggcctggcctttccaggctgcagggccagatcctctcagccagcccctgcagcaggccccagcatcccagagaggcagcgggtccctgtatgtgctcagcaccttctctctgtaggcggtttctctcccaagacatttgagacttttgccctctgcctggtcaccttctttcctagccaggatagggctggtggatggttttgtttttttttttccttaaagccaattccaaacaagggctgatatttagttggcctttctttttcttctctcatggttttgtgggttgctggcactttagggactctgttcagagtggagcctccttactctacagctcgctggtaagccctggtggcccatcagcccacagaagggggcactcactcaggtgagtatgaatattcacactccccaggataaatatagactcgaaataatagtttctagtcagtttgggtcagattttcccactcagtgacaaaaacaactttcattatccagagttttgtttgagttgagaattttgaataaagggtggtgggtctgcatcaaccacagttacaatatgcaagagctgggtcgtgacttcatccctttggtcttggtgggacatcaccctgaccggtcccattgccacctggcacatgatgcacctcagtcgtcagcgtgtgcccagcccagggccatgcagagtgagcactcagggaaggcgcatggaactggactgggtggctggtgtgtttggtgataggttagctctgctgtcaaagccaagcccaggtgggtcactgtcacatacccagcacggtgtgaggagctcctccagccactctcaggggcagctctcctgaccctgcctccttgattttggaccaggcgcttttgtttctgggccaagcacctgcctgtagcaatgggtgtggggacttgggttttgctttgctagtggagaatatggctgggatctgggttagggcagaaagctcaggtagatgacaggtgccagagcagtggttcaaacttgggagaatcacagcaggagcctattaacaatgcagattccagggccccttgatagacctgggaaggggggtgcaatcagcattgttaataagtttgtgtgattgtgaggcaggtggccccaggattgtgctctggttgggtggaccaataggtaaagcacagtgtgatgagctttgggatgatggaatggggagaaggaaggggctgtaacccagggagagtctggggtcaaggaaggtcacccagaagaggtgagctgagtcttgaagaacaaagcaggaatggtaataatagctaatcttgattgaacgctttgtgccaggcacagttctaagccttttccatgaatgaacccattcagtcctccagacaacccctgaaataggtagtaaccccagactcacacaggaacagacaaaagcactcggggttaagttgctggcccgaggctagtgagtggtgagctaggtcttgcctgcttattgcacggcaccacgtggggtaaggtgtgccaggcagcgggagcagctcagcacagtgatgcaggtgtgctgttcagtggttcagatgatgcagaacctagtgtggggggactgcttcagttctgctttgttggtggagaatatgtctgtgatcttggttaggacagaaagctccgggtggatgacaggtgccagaatgtcagtttgagagggctgaggctggagctggcaatcgggatagcaggcacacttcctcacagtctgaactggaaggagcgtggagtgttggggagaagatgcagtgtcagtgcccagggtgcagcgaggcacgggctggcaccctgacccagcccccttcccagaggggaagaattcgctatggcccagcccctgcccttggggtctgaggggatccacttttgttaggagcctgctacacactttgctttctttcgatccttacattgcccttccaggtgggcttattattcctattacagataagagagctgaggctgggaagccgagtaatttacacagggtcaggtcatacagcaagttagcaggtagtggtgccagcagctggctgtcttttgtggggatgtgttttcaccacagcggtggcaacctgtgtcctgacaggccaggttcctgcatggacagtggggcccccaaagagcaggtgcagtgccaggctggacagattccagctgtgccggggccttgggcaaagtggcctggcctcaggagacacgtttcctgttgctgggtgacattccacaggtgggaggcacatgcaggacctcattccctaggggccttcctggtctgggccctgatgccctgacgctggggttgaccctctactgccctggaggctcacctgggcctcgggacagaagggattgtcccattaaggagaatcctctacgagtctctgattctggaagctcttgttttttatcctcccatacaaaaaacaaattggccaccagtctcttcccttctttttggccactgtctcaccatctccttcacccaaccttggtttctttcagcctgtgcttcccagcagagcctgtgggcttgttgatttgaacccagaaaccacctaggacattccagaggtcttcacacttgtctttgttgcccattgtaggccgttttcatagaagggtattgggaggacctgccttcccactcaggccaatgtgaagctgttgctcttttgctaagggcagggtgggatatggccgagaattggtgggcgggcctgagatccattcagcagcaccccagggcgtgctgtttctcacaggttgcagcctcttccagcccctttgctttctgtgacagagctgaaagtctcatttcctctttggctttccctttgaaatgggagagagggtggtgggagcttagctccttccaggcccattttacaggcagagtaaccaaggccgcgactgctggagagaagcggaaccggagttcccgtgcccattcctgttggaatctcctgtctgtgtgccgttctttaagatgggctggagagagtcggggcagctcttctcccgggttttcaggcctgggttgctcttctgggcacttcctggtgttttcttctctttgcctgaatcaggcctggcctcaggcctggttacaagaaggttggaggctggctgtcttgtgttcatgtgtcacgccaggcctgagaccatcattgtctctctgagatggtccacgcccctcctgtgaacacaggggctacagactatagtatagttcttgccacgttcccgagttttgggggctgctctccacattgggattccaccaggatgctggtctgcagtttcctgcaggcagaaggcgctgggttctgagttggctttaggtggaacccaggtcattcctgggtatgccttgggagggcggcgaggctggccgcagctgggcccggcatcggagaaaattgtgtctctctggagaccctgcagccttcccacccaccagggagctttccatgggctgtggggaaggcgtcagtgtcgggtgagggaacaccagcttcacctcggctcatctgggcgtggcagacgactgcttcctcacctggagagtgttcaaggacagcaagaaaaatgagggactttcaggggcagctgtgttttctgactcagtcataatgcccctaaaaatccttattgttcttgcagtgtgcatcgggcagcggccagcaacctgcctctcacccacctggcccttctgggaggaccgggacttcctggggtcagattggaatgtacgtccaaaataagagtgaatggggatttgctgattattaaaacaattttgtttgcgtgcatttttagcatcttctcttctggtggaggattggagtggctgagggtcgggagggctggacatcaagatattcctgtgcaggttggagcccaggagggtgcaggaactccctggtttgtgtgcagtgaaggcctggaagagcctagctgcacgtgcagtgcccaaggaaggtcatcttccgggtcagtgatgttagaggcaacagagttgggctggacaagatgccccccaacctttcctgagaagttgaggcaggagtagaggaggcatctatctgcgcaggaacttgcattgtattttaaaatagaaggcagcctggccaacatggcagaaccccatctctgctaaaaatacaaaagttagccgggtgtggtggtgtgtgcctgtagtcccagctactcgggaggctgaggcatgagaattgcttgagcccaggagttgcaggttgcagtgagccaagattgcaccactgcactccagcctgggcaacacagtgagaccttgtctcaaaaaataaataaaataaaatagaaggagcctcagaatccactgtctgtctgagacccagtgaactagccattttgaaaatagaacagtgaattgagggtctttccccctctactgtgaccctggagcttgcttttccttgactgaaagtcctccatccttatttcacttcatggatctcctccattctcagcaggtctccctacccctgccctatccagccccaccctgcagatacagtcatgcactgcctaacgatgttttggtcaacgagggaccgcatgtaggacagtggtctcataagattataacactgtttttactgtgccttttctggttaggtacacaaacgcttgccattgtgttctaattgtctacagcattcaggataggaacgtgctgtacagatgtgtagcctaggagcaatgggctcccccacctagcctaggtgtgcagcaggctattcaccatctaggtttatgtaagcacactctgtgaggttggcacaataacaaaatcacctaacaatgcctttctcaggatggatccccgttgttaagtgacacatgactctattttgaccagccaaggcttttggaggtcctgggggattgtcgagaagcagaaatacctttttttaaattattattattatttttatttgttttgagatggagtcttgcactgtcgtctgggctggagtgcagtggcgcgatctcagctcactgcaacctccacatcccaggtcaaacgattctcctgcctcaacctcccaagtagctgggattacaggcgtctgccactatgcccagctaattttttgtatttttagtagagacggggtttcactgtgttggccaggctggtctcgaacacctgacctcatgatccacctgcctcggcctcccaaagtgctgggattacaggcatgagccactgcgctcggctgaatccgatttttctgagacctatttttttattttttatttttttgagacacagtctcactctgttacccagcctggagtgcagtagcttcatcacagctcactatagccttgacctccaggactcaagggatcctcccacctcagcctcccaagtagctgggatttacaggcacccaccaccatgcccggctaatttttgtattttcagtagagatgaggtttcaccatgttggccaggctgggtctcaaactcctgacctcaggtgatccacctgcctcggcctcccaaagtgctggattacaggcatgagccactgcgcctggccagaaatactttgttaaatcaatttgtgatatgcctgccttccccaacaatgccagtccaccaaacccgaagcaacagaatcctgctctccaggggagactgggctggtggcttgcagtgaaggacaggtggggagatggacaaagtgacaagcaggactctgcatgccccagtgggtccactctatgtcttactgccctcatgggtcagcaggggaagtttacccttgaggtatttccagggtctctaggtgcagctcaaaagctctcgtcactggaggagatgaccacgtgtgctcagcatttgcagaagtccaactgccacgatcttccctgcagcccagccctggctccagtgggcactggccggtgctactgtgactacctccacatgagctctcccagagacagttttgaaggagctgggtttgctcaggagccttggcttttttctgcacagggcaaggacagctccaaggtaaagtttaaacatgatggcatttatcctttcttggtaagggataggtggggctcccatgaaatgctattctcgcaacctccaacggacaggggtgttgcaaaggttccttcatccccgatcagcttccctgccatttgctcccctcaaccatcccctcccatggggcccctttctcctgcccttcattcccctgaacctccttgttcttacatgtgttcctcattcttttttttttccttcttgacatagaatcttaactctgccacccaggctggagtgcagtggcctgaaccaggctcactgcaacctctacctcctgggctcaagcgatcctcccacctcagcctcccgagtagctgggactacaggcgcacaccaccatgcctggctaatttttgcatttattgtagggacagggttttgccatgttgcccaagctggtctcaaactcctgggcccaagcaatcctcctgccttagcctcccaaaatgttgggattataggtgtgagccactgcacctggccagttcttcattctttaccacaaaacatttgcaaaagataatacatcaacttttttggttttttctttttttttgagatggagtctcactctgtcacccaggttggagtacagtggcacagtggcatgatctcggctcactgcaacctccgcctcccaggttcaagtgattcccctgcctcagcctcctgagtagctgggattacaggtgcccgccaccacgcccagctaattttttgtatttttagtagagatggggtttcaccgtattagccaggatggtctctatctcctgacctcatgatccaccctccttggcctcccaaagtgctgggattacaggcgtgaggcacggcgcccagcctacgtcaactttttaaaagaggcaatatatcaaacataaaactgattactgttttttcccaattataaaataattgccttctactatagggcatttgaaaaatacaaaggggccaggcttggtggctcatacctataatcccagcactctgggaggcctaggtgggctgatcacttgagttcaggagtttgagaccagcctgggcaacatggcgaaaacgccgtcgctacaaaaaatacaaaaattagctgggtgtggtggtgcatgcctgtagtcccagcttctcaggaggctgaggtgagaggattgtttgaactcgcgaggtggtggttgcagcgagccaaaatcgctgcatggcactccagccttggcgacagagccagaccctgcctccaaaaaacaaaacaaaacaaaacaaaaagagatggaaagggcttataaatgcccatacctagagataatgtctgctaattaaatctatctttccagcctttttaactcatgcctgtacttccccacccagttagcaggattgggacttttaaaagggtcaggctcataactcatttgagcaatggccctgtgccctcaggccagaaagcctttattttctttttaccaagcaggatatgctgtgggccgctgctggcctctggccaggaagctcagtgatcttgctggagggtgtttgagcagcaccaggtctctctaaaccaggattgatgaaattgtcagtgaggatgccggacaagagggctttatcccgtctgatttataagtgggcggctgcattgcttcttgacctggctgcacagaagaatcacttgagagcattaaaaacatgccaatgcctggtcccatgcaggacccattggatctgaattgctggggaatgaaagggcccaaagactggtatctttgtttttgtttgttgttttttatttgttgtttgtttttttaacacagggtctctctctgtctcccaggttggagtgcagtggctcgatcttgggtcactgcagcctcaatctccggggtgcaagtgattctcccacagcctcccaagtagcgtgtggtgtgtgccaccgcgcctggctggtggttgtttttgtttttgtttttgtttttgagacagagtcttgctctgtggcacaggctggagtgcagtggtgcgatctcgtctcatggcaacctctgcttcctgggttcaagtgattctccttcctcagcctcccgagtagctgggattacaggtgcccaccacctcgtgcggctaacttttgtatttttagtagagacagggtttcaccatgttggccaggctggtctcaaactcctggcctcaagtgatctgcccgcctcagcctcccaaagtgctgggatgacaggcatgagccaccacgcccagtgcctggccatttaaaaaattttttttgtagagacgaggtctcactatgttgcccaggctggtcttgaagtcctgggctcaagcttcccaaaatgctgggattataggcatgagccaccacacctgaccagttattatttttttttttcttatgttcctcaggtgagtctcttaagcaatcagaggagaactgttgggttaaatgcccacaagctagagatggaagaggtttcctccagctttgccttcagagcccgatcaagggatgtgaccatttgcagttggccaactttcatttccgttactgtctctgctgctcagtcatcttttgatcctcattttgcaagcagaaaactgaggctaaggggatcgggggacttatctgaagacacagaatatggcagagatgagatgtaaaatacacaacttctgaccctccagattagtgctgtttcagtagtactagtcattagtattcatgatgagcatatggatcataagaagcatattcttgtgcttaataataattggacacttggtcatcacagtatgctgaggcgtgggtaggggctgccccagcagggtgagtcatcatcccctagtttcccaatgctctgtgtcccctgccagccagcctggacccacagctgcccgcagcctgccctgttgcactaatcccagctgtgggcacggtgagatttggccccattttacacatgaggaacaggctcagaacactcaagaggcttggcccatgtcacccagctctccttgcctggacagaggcatctaggaaggaacacagccctgcatggggcttgcttgtctgagtcctcagggacagagctctactgggggtgcccaggtctctagcagactgtccctgcccctctctccttcctgcccagctcagctccagaggcctggcctgcgggcaggctgggcaggcagccagcgcagggagctaacgatgggtgcattgtcggctccaggaagtggtcagctgttccctggcaggtctgcagagccggaggaccagcctgccttgctcgtggagggtagagatagaatctgggagctcagaacaccattttcccggagcccagtggctctgggccagccctcgggcttcctttggaagggagggccccgtgtactcctccgctccttccttgcttggcattggccctctccctcctcagtctggctctcaccgtcccccggcccagcactttgcagcagagtgtacactcttggcagcgatgtccattaaacctgcttcccagaaagcagcatggctgtacaggcagattcagccagcaccttagtgggagatggggcagtgggcatcagctcaggcttttcttgcccaggttccctggggagctgggttggaagatagccctaagctgccttggcttcctgcttcctggatcagaagtgccctcagctcagtcagcagcctagccgctggacaaggctgagacaagcgctttgacctcctggagttgggctgggacgagcctttgcctgggagtctgatcaaggcggtcactgagctgagaacctggggtaaagctccctgctgagcctgttgcctcatttgtttgatgggtgccatagttccctgtaggaatgtgggtactttctaggcttcttccaaatagatacaagaaattgtggctgcctttcccttcccggccaggagtacacttcagcagagaactcagtgatgcctggcatggggaagatgcccagtgaatggtggttgccccacacggctcaggaaatgaagtttgggtcacagcctgaggatggtgccttccatccttgaccctgcaaggacaacctttcctgacagtctcctccctgggtgaagtattgggacagtggctctggactggaaaactgaagctttacctctttgctctggattcccatcaggtctagattgctgaggcccagcgcccacagaggcatcttcccctctagggggtttgtcctataagcccggactccgtcagctccgaggcactcctgctgggcctgggccagagtggctgatgtggaactgctccctcccctgccagcttccttggggtgcagacagcccagcacaggcaggaagggctttctgtttggctggactggtggggaagcaattagtgcttactttctgttttgattcttgtagctaataggcagagtttgtgatgtcacggaaaagcagccttgggcccgcgtgggtttgaggtctgtccctgatagtctggccaatgtggaattgtctggaggtaggggtgtatgctgacactactccctgggtatgaggtggccatctgttggctttccatgcccccttctgataatacctcttttaatacctcttttttctgttaataacttcaggagatcacttctcccctaccctgtatctctggggttctggtgtggccaaccccaaaccctggctttagacactggcatgtgttccaggcctggaggccaagtcctgagactctgccatgggacatctgcagcagttatggggaaagaagcattctttttctgagggagttgctgtattgataggatgtaggctgggaactgctggtggccatcctgtcctcaacttgacaaagccaacaaagaggaaagaaaatgaagagatgaggccaggcaccgtggcttgtaatcccagcactttgggaggcccaggtgggcggatcacaaggtcaggagatcgagaccatcctggctaactcagtgaaaccccatctctactaaaaatacaaaaaaattagctgggcatggtggcgggtgcctgtaatcccagctacttgggaggctgaggcagaagaatggcatgaacccaggaggcggagcttgcagtgagctgagattatgccactgcactccagcctgggcgacagagcaagactccatctcaaaacaaacaaacaaaacaaagagatggagagtatggatccagacatcagtgagcccctggatccagccatgcctgaaaccagctgcagcctggactaacctgattttgtgagccaatacatttcttttcttttttcttttcttttcttccttccttcctttcctttttctttttccttttcttttttcttttctttttttagagacagggtcttgctctgtcattcaggctggagtgcagtggtgcaatcatagctcactgcaacctcaaactcctgggctcaagcaatcctcctgtctcagcctcctgagtagctgggaccacaggcacatgccaccacacccggctaattaattttttttttttctagtgatgcggtcttgctgtgttgctcaggctggtctcaaactcctggcttcaagtgatcctcccacctcagcctcccaaagcactgggattataggtgcgagccagtgtgcctgtccttttttccctaaaaccagcctgagttgggtttctgtcacagaaagggttttaatacaggcagtgtttttctttggtcttgtattttttaaaataaactttattgaggtatactttacatgtaacaaaacccacccgtaagtgtataattcataagttttgtcaaatgcgtgcacccttgtaactattgccacaatcatgatgtggaatatttcttatttgcccctaaaagtttctttatcccctttatgaccaatccctctgactcagacaaccttgatctgcctttgttttgcagattcattttgccttctctagaatttcatgtaaaggtcatcatatagcatgtactcttttgtgtctggtttcttttactcagcatgtttttgagacccatccacatgttgcatgcatctcagtagttcgttcctttttattgctggaaggcattctattattctattgtatgggtgtgccacggtttgtttagccatttatcaggtgacagatatttgagctgtttccagatattgcctattatgactaaggctgttttgaacattcacgtatgtttctttcattcgttgtatgggcgtatgtttcaatttttatatctagacatcagcctcattttactgttgaggaaacagggtcagagaggtagaatgacctgtccaaggtcacatggctgatgaacctagggctggtgcagggaacacagctggaccagtgaggtagctggaggaatggcacctttctccttttgggtatttgggtgtcccttcataaatggagcttgggactgcttggaaggtgctcatggaatcctggtagccaagaacatcattgctgggagggactgtcaagatgtctcccagcgtctgttctccctttctcctaatagtaacactccctttccttggagaactgctcccctatcgctctatctggtcctggagcattttagccttcttggtaacccagtggtcacatgaccttggtgagccaatcacaccctggattggttcagggactggacatgagatccaatcagagtccttccctggaatatttggaatttttccccgaaactctaaggaggatattttggccttaagctaagttgaaattaatgcatcttatccagtgttaaagaaaaagctggaaatgtgggtgggtggccctgggaccctgagaggtaggtgcctaccatgtgccaatgatcatgtgccataattctcacctttcacctgtctagaccaatgttattttccccctgtggattccagggcttgaaagataatatctactaaaccccatacaggaagccagaatccacttccccaaatgtattcttcaaggcatatgcacaactcactgtctcagctgactgctccatcactacacaagccaagggaaggacctggagttgaaatcattccagccgtaggcaaagaggacgatgatgatgatgatgatgatgatgatgatgatgatgatgagcttggcaccaacaaattatggactcctcccagaggtctggaggatgtcaggttggcaatctcagtttagtccagctgcccatttcacagatgcttcagccaaggaaactgaggctcggagaagttaaggcctggctggaatgtggctgtgtcacatgcatcttgcttgcctcatcagatcctcgcagctcccccacccgtcagaccattggctgcttgctgggccttggccacagccagggctgaaggactccatggggtccccgcagttgtttccacagctaaagccgaccagctgcttttccagcctgacttctctgagaccacatcccaggaggacgtgggacctggctcccacatggctgctaaaggggctggagaatgcaacccagaagtggggtgggggcgagagagttctatgggatgacctttgagcaataggaaatgggagggtaaattccttctttctctctcccttcctggagccaaggtttgcttgctgtgaagtggcagccgtgtggttatccatcgtcttgccctgcttcctatcaatttcgtacttcactcctctgttccctcattcctgccctgtggagcttcaacctccaaattaaagcttcagcaattaattccttgccgaaggatatttcctagtgaacccaggcagcctggctccaggatctgccctactctactcagcaaacattgaaccagaggatagatgtgtgggaatgtgaataaatgaataactatctgtgatatatttattttttatttttattttattattattgcttttttttgagatggagtcttgctgtgttgcccaggctggagtgcagtggcgccatcttggctcactgcaacctccgcctcccgagttcaagcaattctcctgactcagtctcccaagaagctgggattataggcatgcaccaccacatccagctaatttggtatttttagtagagacgggatttccccattttggccagcctggtctcgaactcctgacctcaagtgaactgcctgcctcagcctcccaaagtgctgggattacaagcatgagccaccgcgtccagccttattattatttttaaaaataacaatagagacgaagtctctctgtgttgcccaggctggtctattattatttttaaagataacaatagaggcgaagtctctctgtgttgcccaggctggtctacaactcctgggctcaagtgaacctccttccttggcctcccaaagtgctgggattataggcatgagccactgcaccagctttatctgtgatttatgtatcattactatggggatgggagagttgatagggggccaggatggtgccaaattcatcagagattattccccttgctgtcttcccctccattcactacatttaatcagtcaaatactctctgatcttctgctgtatttcagaggctatggcctccccactaacctctctgcctggtataaaagaatccatactccctgatcctccactgaggtatgagatgctggcaaggtactctgcctccctgagtgggtctgcctccctgagtgggtctcccagtctgaaaaataggattaagaatgttctcactgcctaggacctctgcagggcttaacttagtttgtgcctggtgcatgagtgtagcgggcattgttggggctgcctgtgcctcaccatgtcttccaataagtcccagttttggggcccagtctcagtccctactgagtaaatggtgctgtcttctacacccccttcccaggcctgccaccagatccaagttcaatcaccacatcccaggctttgactccaagaattggctcaggcctgggcatgggacttaagtctggccaggcactgtaacagtgccccaaaggtttgctggaacgatcaggaaagaggtacttgctctttgctgagatcattggcttgcagctgccagaggccatttttactattcggctgtttgagaatgaagtcagtagaatgaagtcagaaggaagtggagcaagagccagcacaggacgcagagtcccgatgatgtctttgtagctcctggatccagccaggccagaagctagttaatctctggtaattttaggaatgaagacatcaacattttcctttttatttgcttaaggcagtttgagttgtttctgtgacttaaaaccgaaatgatcctgactaatacagtaggttccctatgaatgatcgctgtggttattgcaactaatattagaaacacatcgatgggaagatgcaaccacggggatgcataggccaggttccttcaggggccaccgcagctcttcacacatcatgcccgggatatcaggtcccagagggtgagtttttttctctttgctgctgatgtatcccaggtgcctggcagatggcaggtgattggtaaacatctgttgaatgaacaaatgcagtgggcccattgtccattgtctggtccagtgcgccctgcctcccagtccccatgccagggtacacacttgctctccacttatccttagctgacctccgaagctaggaggaggggctgccaggagtctatcttggcaaactgatctcttgtttttacaatttcacaattttcctagaaagtatcctttctagggcctcattcatccctttattcatatatttgatttaaaaaaatctttatgaatgagtgtccattttgttaagtactagagaaagatgcaaacgtgaatactattttgcctgccttcagggagcacctgttctaatggggattacactgacaattttggtgtagtcaggttatcttaggcatttggataattttctagtatcctacagaccagataatgaaacaactctaagaaggacattttggctataagctaaattgaaattaatgcaccttagctagtgttgaagaaaaagctggcaatgtggatgggtggccctgggaccctgggaggtagatgtctacctcgtgccaagctctcagcttcccaagccaatctataacaactgccgacttggaatcactgttgcatcatactgatggagaagtaggctcagagaagtgaagtaatttccctgagcagaaatggaatccgaacccataattgtgctgtagcagggaccgtctggtccttggaattcataagacgtctcagtgggcagtggctgattgtccattagctctcatagaacctcctgtggatgttgtggctctttccacattcacccttggataacagtgatttgtttccttgtctacatctcccatcccaactccctagaagagctcccggttgcagtcatctccacagctgtcatacttgtaccttgtaccagggacaggcccatggtagagtcccagtgtcatgagcttctgttgatttttgtccccagcatctgttctctctttcttctaatagtagcactctctttgctcagagaactgcttccctatcactctatctggtcctggagcattttagccgtcctggtaacccagtggtcacatgatcttggtgacccaatcatgcccaggtttggttcaggggctggacatgagatccaatcagagtccttttctggaatatttggaattttccccttggatcatgagctgttaagaatctgactccagccaggcacggttactcacgcctgcaatcccagtactttgggaggccaaggcagatcacccgaggtcaagagtttgagaccagcctggccaacatggtgaaaccctgtcaccactaaaaatacaaaaattagccaggtgtggtggcgggccctctaattccagctactcaggaggctgaggcaagagaattgcttgaacccaggaggcggaggttgcagtgagctgagattgcgccgttgcactccagcctgggtgacgagagcaaaactccatctcaaaaaaaaaaaattgaaaaatctgattctagagctaccagtggctgtatggtggagcctgagagaatgaggccctgaagcagtcagctgagattattagcccctctgcctttctgtgtctggcttatatgaggcaataaactccatcccttttttaccttattattatcaaaatatacaagagcatagtaacaaatcaaatacacgttgaatatctcttacccaaaaggtgtgggagtagaagtgtttcagatactggattttttttaaattttggaatatttgtattatacttacggactgaacatcacaaacccggaatccaaaaatttaaaatgctccaatgagtatttcctttgcgcatcatgttggcactcaagatgtttcaggttttggagccttttggatttcggatttgtggatttggaatgctgcccctatagcacaaaagagcttataaagaaaatccccagccttctgccctattctccccgctttaccccagctgtactccagacacaagctgtttcacacatttccttttgtatttttttctgtagttaccccagttactagatcatatgcttacacacctatttcttgatttataactttagaccaatagccatcaacttttctgtaaggtacatgaggatttagcttatttaccctcctaaccccctcaactttgaaatgtatagtacatgtaggtcatctactgatgacctatatctaatagtttatttctggccgggcacagtggctcacacctgtaaatcccagcactttgggaggccgaggcgggcggatcacttgaggtcaggagttcaagaccagcctggccaacatggcgaagtcctgtctctactaaaaaatacaaacattagctgggtgtggtggcacgcacctgtagtcccagctactcaggaggctgaggcaggagaatcgcttgaacctgggaggcagagctttcagtgagccaagatggcgccacttcactccagcctgggtggcagagtgagactctgtcttaaaaaaaaaaaagtctatttcttttgttcaactttagacagtgttttttgtcttcccaccctttttagaataagaataaatatggatgcccttaccattttatctgcttgttcacaccctatctctgccagctataattttttttttttttttttttgagatggagtctcactctgtcgcccaggcttggagtgcagtggtgtgatctcggcttactgcaactttcacctcccaggttcacaccattctcccgccttagtctcccaagtagctgggactacaggtgcccaccactgtacactgtacaccacttgtaccttgtaccaccaaggtacaagtatgacagctgtggagatgactgcaaccgggagctcttatagggagttgggatgcgtggttaattttgtttttctatttttagtagagacggggtttcactgttagccaggatggtctcgatctcctgacctcatgatctgcccctgcttcggcctcccaaagtgctgggattacaggcgtgagccacggcgcccggctgtcaggtataatttttgtattgtctgtgttattgacattcacattctcttctccacaatgtttgattgattgattgattgatacagggtcttgttctgtcacccaggcttgagtgcagtggtatgatcttggctcactgcaagcctgggctcaagcgatcctctcatctcagcctcctgagtagctgagatgacagtcatgcaccaccatgtgtggctgatttttgtattttttgtagagattgggtctccctatgttgcccaggctagtcttgaactcctgggctcaagtgatccacccacatcgtcctcccaaagtgctaggattacaggtgtgagccactgcacccggactggttattttatttattattattttatttatttatttttttgagacagggtcttgctctgtctcccaggctggagtgcagtggtgcagtcatagctcactgcagccttgacctcccaggctcaagcaatcctcccaccttagctcccctagtaactgagactacaggtgttcaccaccacgcctgctagttttttaattttctgtagagactggggttttactatgcaagctatcctcttgcctcagccttccaaagcactgggattacagggatgagccaccacgcccagccttccacaataaatgtttatagctttgtcaacaggtcgactcaaaagattcccaagaaacaacatttacaggactatgattatgaaacgctgtttactgtaaactcttttagccaaagctagtttgatttgggtttgtgttggttatggccaatgtgtcctgacttatacactcaagttttgttgagtcgaatgaggtgtgtccacatgccttcaaacacaagcggggacagagctcaccccaggccacctctgtgggcctgccactcacgcagtcacaacagagcccaccactaaaagggttctgtgctttgtttatgctttcaccatgttgaaattcttaataattttgaacaaaaggccccataaaatatgtagctggttctgagctcaccatttgctgggagaggcctgtgctttctgagaaatagtctctctccttggccagggctatgctcctgggagggcccttaggcaggtccggaagcagccatagaaagtaagagggaaaggctgtgaacctgagggttgacttggtgaatggacctcacattgggaggtcagactgggcttctccaagtccctcttacaaagaggaaactaaccttggtgaacctggggctgtgtcaaggagatgggattatccctacatttacagagaagcatcagggctgaaagatttgcccaaaggccactggttataaatggcaggtcctagattcaagtccaggcctgattcctgctccaccgtgcagcctccagatcagtgctgcgcatgaagcagcagacctgggtttgagttcttgccctgctcccaatttgctgtgtgtcctttagtgagggacttgccctctctggcccacttaccctagcagtcctttgagagagctgatcaactacaaaagtccctttcaaacagaatcactatgtaaccaaatcatagaggagaggaagtctcttttatagatggattccagctaataaatgctgaatgattgaaatataatgtcattctgaagtccttaatgaattaattgcttgaagcttccatggctgctaacatcaggaacaaataattggacattatgtgcctcctaatagaagaatttgatgccagctaaggacatggtcttatgtgtgtgtgtgtgtgtgtgtatctatctatctatctatctatctatctatctatctatctatctataacttgaatctgatcaagcctctacttccaactgccaacttttaggaaaaacagaggatagaggaacatgttgaactacaccacaggggagcaatccacaaaacccagatggaggaaaataccacaagacaaacaactcgtttcctccagtaaataaattgcaagcaaaaacaaaacaaaaaccttgctgggtgtggcagctcacacctgtaatcccagcactttgggaggccaaggtgggtggatcacctgaggtcaggagctcgagaccagcctggccaacatggtgaaaccccgtctctactaaaaatacaaaaattagccaggcgtggtggtgggtgcctgtaatcccagctactcaggagactgaggcaggagaatcgcttgaacctggaaggcagaggttgcagtgagccgagatcgcaccaatgcactccagcctgggcaacaagagcaaaactctgtctcaaaaacaaaacaaagcaaaacctctagacccaaaaacactcagagaatatactgacgactgtaatgtgtagacctcatttggatcaaaatctaaacaaactgtcaaaaagcaactgtgtgacaattacaaattggaacattgacctgctctttgataataatagcaactattgttaatttgtttgttgtgattatggcgctttgttttttggaaggaagagttcttttgaagatataccctgaaatatttatggatgaaatgatgtcatgcctgagatttgcttcaaaactggccgagtgcagtggctcacacctggaatcgagcactttgggaggcggaggtgggtggatcacttgaggtcaggagtttgagaccagcctggccaacatgggaaaaccccgtctctactaaacatacaaaaattagcaggatgtgcagtggtgtgcacctgtagtcccagctactcaggaggctgagtcaggagaatcgcttgaacccaggaggcagaggttgcagtgagctgagattacaccactgcactccagcctgggcgacagagtgagacttcatctcaaaacacacacatacacacacacacacacagcgaggagggatgtgaatgggaaggtgggtgggtctggatgaggcaggatgggtcataggtcgatgattgtcacagctgagtggtgggtatatcagggtttgttataccattgtctctttgtgtgtgtgtataattttcagtttctagcccatcgtaagggcctgagggtgggagttctgcggatggctagccatgccatctcggagcaggggtgagggcatgactttgggcacaccaggcctcgcctctcacaccaggcctcgcctctctctccccacctgccttggccaggctgggccctggagtgttgtgctcactagtgcccaggctcagatctttgtgtttggataagctcatggaaccagacactgtaattgtagaactctggccctcactctggtgactgtgtgtgagccacaagccgggctctcccctccccgggcaggctggctccacattccaggcacatcatcgcctacgccaggccatctggcctccagcatgggtggggaaggtgcagcagctggtgagagctgtaggggcattcccagacacatttctcatgacatccttggcgctggtagcatggccagcaccaggccaggatctaaggacctggagggtcagagggccactgtcaggcccaccgcccaggagtgctccatgaaaggagtgagtaccagccaccttggtgctgtgtgaccttggcaagacgtctcccctccctggccatgggttccccattcaagaggaggcagctcagtatttctcaatagggtgctattgaccctttgggagggacagttcttcctagtgagcattcctggtccccagtccactaaatgccagcagcagtccctgtcactgtggcaaccaaaaaataccctacacatttccaaccaccctgggcttgcagaccactgtgggtctttaagggccttgccaagcccacagttctgtatatctgtgcttcttgagcatttaggacaaattgggtaagggaggagtagaaaccattactgttgctcatagtcttgcaaggggatgaaatctggatgggtcttgaagtataactaggagtttgcaaggtgagcaagcaatggggaccaggggaggggagcgaaacgaattctaggtggaaggatcagcttgcatgcgggcatggagatgggaaagaacatggggtatttggagaagtgcagaaattccctgtggccccaaggtttggcctgggctgagaagccatgcagtggaggtagggcttcaacttgtagataacagggaaccagcaaggctgtttgttgtttgtttgtttgttttgttgtttgtttttgagatggagtcttgctctgtcacttaggctggagtgcagtggcatgatctcagctcactgcaacctctgcctcctgggttcaaatgattctcctgcctcatcctcccgagtagatgggattacaggtgcatgccaccacaccccactaatttttatatttgtagtagagacggggtttcaccatgttggccaggatggtcttgaactcctgacctcaggtgatccacccaccttggccttccaaagtgctggccccaggtctgacccagtgaggctttttaaatggggcagaaacttacttcccctcctcctgagcaagagcaggtttttccaccccagtccctctggactgagaaattaccaacgcctgggtgtgaatcaggagaatgtctcactcctcatggctcaggactgcagagaatgcaatcgcacagctgggatttggggagagatttagaggtgacagtgagagagagagtgggctcctcatgtttgttttgttttattttgtttttgagacagggtttgcctctgtcacctgggctgctggagtgcagtggcaaaatcatagtttgctatagccttagccttccaggttcaagtgatcctctcatgtagctgggaccacaggcgaacaccaccacacctggctaattttttgtattttttgtagagatgggggtctcactatgttgtccaagctggtctcaaacttctgggctcgagcaatccatctgcctcagcctcccaaagtgctgggattgcaggcatgagccactatgcacacttcttaaactagatgagaacaccatggaggggagagtgtgcctatggagtgagtgtgtgtgaggagtgcatgtaaggggtgtgctcatgagtgtgtgtgccccacacatgcaggctgctcattcattcatttaatacgtgccagttgcacagggaaaggtgaacacatcctgacctggtcctcgtcctcatggagcgtggaatccagtggatccagtggaggagaaagaaacaagaaaacaaaataaaacacatcccaaaagctagagtgcgaggcagctagggcgggagtggggaataatgagggccggtggggagagcctgctggataggtgggtgtctgatggccctctcagagcagagcatggatggtgggcatctgctgagcctggaccacccaactccctttcctcacaggcctttagtttcttttggggaggaactgcctcttctctgctggacagagtctaccaggctccctctgccctgccctgccatagggtggacatgtgacccacctagccagtaagattgtccactcctctaattcatgggcagaaggacaaggacagtcagagtctcccggctgcctcctgccacgcattcctgctccccacccccaatctatgcgcttgcccttcccgccttttggccctcaggagctgtcttggttcctgcccttgcccaggcctgtttttccagccttcccaccaattttctgagctcctgtgggtgtgcctatcttgtgtgggtttggttttggcttttaaatgagcaaaggcagaatgagggtgccatgagcacagatgaggcttttgggaaacgccccccttccattgcactgttggaagggagtgtagaggctgctgtgtttcctggggccggccaccttgacaccgtgcctgcatgcacgcagccccccagcacgcttcttcaccagccagcctgagtgcagggccctggccagccttgccgggaggaaatgccagccccgtttctttaagcctcagtcagcctccccagggactcttgactgccctaatgcttcctcctaggccttgtcagtggtgcaggcctggtctgcccagagcagcagggcctccggcaggggcctgtgactcagggctcagtcaggcggaggcaggatgtcagtgccattcactgggccacgaggaatctcactcttctatttataggcagcgcaactgctggcccagcctggccagaggaagtggctgccactgccagcgagtcaggagctacgatgagggaggcatggcgctgctccctctgcctgctgggggggatttccaggttaggaccagctcttccactgcagaatggtcaaggctgggacaggccggaacaatgagctcatgtggcttcatgacccatcaactgagcaacagggtggtggacatggggtggcttggtctgtcatgagcctagaagggagggcaggatggggacctccctgaccctgcagggggaagaggtaaggtaaaggcagtgcccagagcctggcatcctgaagtttggccccagacaactcaccccactcttcctgcattggggtcccaacttcatctgtcagagacccctgtccccacctgccatcttgccccacaccaagacggctgcttgtgcttaggaagctaacactggatacctactgagaggtgagccctgtcacatccattcctgcatccagtctcacaacagctacacaacataagcccatttagcaaaagtcaaaactgaggtcgagagtggttaaggcacttgcctggttttgggtgtgtgcacaaatgtgccctctatgcataagtgttgtaaaatgtgatctaccttcccatcacagaggagctgtgaggggaactgagatggctttggccattgtgaatctgttgccatctctgttggagtgcccgtctacatggttgacctctgtcctcagttgagtgtgcatgaagcatgaaggattcttgtgtttgtttcctgccctggacaaggtgtccctggaggtcaggaagggagtcttgctcctcctgtgaccctagaccccagcttggatggagcttggcaccaagcaagtgctcagtagactacctaccgcatgggcccgcagagtctccccatcctcagacgtggcctcttgcaggcagcagccctactggatgctctgctgcattgggtctgcacaaggggcaggtactcaaagaatgaggatggggggacacttcttcccgagaggctgcctgacggggaaccccaggccttcagtcctcatgtcaggtgagaaccaatttcttgaacaggaggcctttccgactgagtccgctggggccagttcagaggagaccagcctggggccacagtggatattgcagatctgccctcctgtgactgccggctggtctaccatgtgtgctgctaccaaggggcaggttacccctctcaccccacctggccgtgttcgcccatcctcactgaccctgaggaagctgggagcacctggtgagcctttactgaaaggcccaggccattgttccaaagccaggcagaatgggagggaagaaggaggtgggggaggcaattggggttgatacaagatgaggtctccctgcctggagctccagagggccccttctggcctcttctgcagtccttggctcatccccttcacctcctcctacaggaagccttccctacctccccaaccaaagttctcacccttccttcctaccccaccacatctcttcctaaggtaattggcaaaccccagggcccttcctgagtcttgcaaagtttgcaggtctggcagtctctacatgtcagtggctttccttttgtgggcaggaccccctgagggggagcacaggagggaacgtggtaggggaggggttggctctgaagggctcccctgaggaagggaggatgagtaggagtacagtcagtgtgagcagaaaaggggtcccaagggatgaagatctcaaggaggggaggtaaagcttcgagaatgtgcaaggagctccagagggtggaggggggtaaagcgtggagtcgcagggtgtggggggaagtattccaaggcaggagatcgggggcagatctcgagggcctcagggcaggccaagctttcttctgagcgcaaaattagagtcagtcaagggtctcaggcagggtgctgctttgcagggtgctgctttgcaggctggggtaaaggtggaggagatagggtggcagcaggagggccagctgaggatggggcggtcttcctgctgagagatgacagcagctgaacttggggaggtgggggcagtggagtaaatgggaggctgggagagaactgagaactctgatgtggccttgatgccccctccccaaggcccacccatactggtgaggattggggtgaccggtgtgaggagagggagagcccctgatgaggccagagtccaggcccagagagaccccgtccgctgtgccacacatgacatcatttttgtgtacttaacacaaggtaaacagggctggaaaaacccaagtactcattatctgacttagtggctgctgctggctccttaacaactggtttcctgggattctgcagttctcctgcagaacggacccagacagaggggcttccctccggtgcacagagaatccttgcccagtccctgtgctgggggctcgctgacctcttccttctgggaggctttgagtcgttccctaccagttcatggggctgggcctgctgagggccaggcgccagggtgggcgttgtgggagcatgacggagagcaaagcccaaatgtggtcaggggggtttggttctagtgagcaggtgggtttgagaccccaggagcacaggagggcagtgggagcccagcagggaggttgtggtaagcacccaagcatgagctggccgagtcctggaatcccagagggcacctaggaggttatccactcttttcttttttttcttttttctgaggcagagtgtcactctgtcacccagggtggagtgcagtggcacaatctcagctcacggcaacctccgcctccaggttcaggtgattctcctgcctcagcctctcgagtagctgagattacaaacgtacaccagcacacctagctaatttttgtatttttagtcagggtattttgtattttagagatggagtttcgccatgttggcctggctggtcttgaagtcccgtcctcaggtgatccacgtgcctcagcctcccaaagtgctggggttacaggcgtgagccaccacacccggcccattttgccatttgattctacagatgggtaaactgaggcccagaggagtcacaagactcacttagagtcatactgggagagaaccagtggcaggactaaaacccaggtgttctgatgtcggcgagaaattggctggctctagaaagaaaaacaaatttaagcattaatcccctccccacttccactcaccacccaaacatgcacacatgtcacttctgcaaaatgtcaatgatcttgtgagaaattttttcttagtgggtaggttccaagtgctttcctttcacccccagaacccacccccaatcgaggccagaggacaacattccttcctgtggaaatagccgaagggtggttgggcagggtggctcacacctgtaatcccagcactttgggagaccgaggcgggtgaatcacttgaggtcaagagttggagaccagcctggccaacatgatgaaaccccgtctctactgagaatacaaaaattgctgggcaggcgtggtggcacacgcttgtaatcccagctacttgggaggctgaggcgggaggatcgcttgagtctgggaggcgaggttgtagtgagctgagatcacactgttgcactccagcctgagccacagagtgagactccgtctcaaaaaaaaaaaaaaaaaaatagccaaagggtgaccaacagccgccaggcagcctcagaggaccgattgtttgccactgctctacgtggcagcactgggtgcctctggccccagtccaccctccctaccccactccagtcctccatgttccctggatggaggccccagcaaggcaagaaactttcaaagagcccagaggcacagcaagttcctgcactaatgacactcgggggctctggggccttcacttgcaaagcaaaccctgaaaaataatctggtggattttgttctctgccttaaagaacagcaaccacagacaacaacaatattcctctttttctaatgtcagttgagtttaacagacaggcagcacggaggaaagctggaaaactagccctgcagccttggacagatccttaactccccttgggcctcagtttccccattggtatcgaaccctaagcattcttaagcttcactaatctgtgagtttgaatgaccagttaatattaatgaccaaagcctgctcaccctaggcccctacttctgctcccagggcctttataagagggaggcaggagggtcggagtcagaggcagtgacatggtggcagaagcagagggagagaaggcaagggtcagcgagatgcaaggaaagggtcaggagccaaggcggcaggtggcttctagaagctggaaaaggcaaggaaacagattctcccctagagtgtccacaaggaacacagcaccgccagcaccttgacatgaggacttcttctccggaaccaagagagtaaacgtgcgttgtattaagttatgaaatttacagttgtttatgacagcagtgattggacactggatggttcaagaatagaaagtggctggctcaagggtaggacagacaccactcctgctcatctcaggccacctgcctggcctcctctgccccttctgcccagtcagtgccgcttctttggtgaccctgagacacagctacctctgttggcctcactttccacatgggcttctgcaagggccaccaaagtctgtgggtcgctgcctgatcaccctagcaactagtgtttgcaatctttttttttttttttttttttttttttgagaaggagtctcgctctgtcgcccaggctggagtgcagtggcgcaatcttggctcactgcaagctctgcctcctgggttcacgccattctcctgcctcagcctcccgagtagctgggactacaggtgcccgccaccacacccagctaattttttgcatttttcagtagagacagggtttcaccatgttagccaggatggtcttgatctcctgaccttgtgatccacccgcctcggcctcccaaagtgctggggttacaggcgtgagccacagcgcctggccttttttttttttttttttttttttgagacagagtctccctctgtcacccaggttggagtgcagtgacgtgatctcagctcactgcaacatccacctcctaggttcaagctattctcctgactcagcctcccgagtagctgggactacaggtgcgcgccaccatgcctggctaatttttgtgtttttattagagacagggtttcaccatgttggctaggctcgtctagatctcctgacctcaggtgatccccccacctcagcctcccaaagcgctgggattacaagtgtgagccactgcgcctggcctctttttttctttttgagacggattctcactctgtcaccctggctggagtgcagtggtgcaatctcggctcactgaaacctccacctcttaggttcaagcaattctcctgcctcagcctcccgagtagctgggactataggcatgtgccagcatgctgggctaatttttttttttttttttttttttagtagagacggagtttcaccatgttggccaggatggtctcaatctcttgacctcaggatccacccgcctcagcctcccaaagtgctgggattacaggcataagccaccacgcctggccggcatttgcaatctttaagggacagtggtagcagtagcttggcctttttctgggtcctgagtgttacacatacatgcgagtgcatatgcgcccacacacacgtgcttgcacacacacacacacagacacacacacacaaacacacgctgtcccctgaacgcagacccactgcccggctagagccagcggccccatgatttaggattttgttctctgcctgaaagaacaacaactacagacaacaggaccaccctcaccaacagcacccaggctggtttctgaggggagccccctatgctgaatgtcccttacctcctcacttcttcgcaggaaccctcattctccacccaccccaccctctccaaggtggtcagacattctcagtaggaatgtccccagctgtggatgtggttcaaggtttccgatttcttaccgagaggcctctcagcccccatagatccacatgcagaaagtcctcacttaacgtcctctcgatgggctcttggaaactgcaactttaagcaaaatgacatacagcaggttctcaatgatgtcgtttcgtcccgtgtcatttccctaataattgatttcattatacatcattttgtcaaggtcacagtttccaagaacctattgaggacgttaactgaggacttactgtacgtgctagggatggggtatggaaggtgccgaactccacctgccatgagtcggccagggaccagcatccagggcaggacctaccatgcccatgtggcttgtaacctggctgtgggagggaggtgggtaatggttgtatatgagcccccatgcctccctgatcattttctggcctggacccctgctatcgacgtcccctgccccttctcatcctccaggtttgtttgtcctctgcctccctttcaccagtggtgtaagcaagcccccttcccgtggcccagttcagcagtttctttctggagaaaccactgacaacagtcagttttgcaggatcttgggaacattttcctttgaaagactttttaagcttttatttaattactcaagtgacacatgttccctgaaggaaaaaaaaaaagcaacaaacagaagtgatctctcatcctacttatatccatatagaaataataatctgctaagccactgctgaagtcttgctatatatctgatctatttctaataatctgatatctgataattgatcactactggaatattgtttatttgtttttaacacagccatgatcatatcacacatacttctccaatgcaggcttttctcacacagcaaatgtgtgatgaactgctttctgtgtcagcagacctaacatcatttttcatggttatgtggtatttgccggtatgaatatgctatatttattaagtgaattgttggacaactatgttgtttccagtttttcaaagccataaacaatgttgccttgtaaagacttctttgcccacttacccagctatttcgggaggagaaattcctagaggtgaaattgcttggccagaggttgtgcacatttttaaggcttttggtgcatattcctggccccctcttaaatccagacccatttctttcatgctttggatttgtcacctactttagcattaactcaagggcaaataaatttcagtggtgaatctgctatttacaattttctaggcagcttctgtccattaatatgcatgcatgaaaaaaatgactctagtttccatttttaaaatgccaagcatattctcaccccagtgttcctgtgcacctggctcttcttggtagttttgagagttttggattaaattgtgtttttttccttctagaatgagaagtccctagatgaagccaaagacagtataatttctctgagcctcagtttgctcatctgtaaaatggagacattatgagtactttgcagtattttcatgcaggtgaaaagaacccaactccacgtctgacatgatgaaatctccgaattttatctgtcctctcccttccagggccaggtggggtgtgcagtggggcctctgggcccaggtgttggcattggacacttggttcctcctgggctctgttcccagcttttcctacccatatttccaggtacccaaggctaactgcctcccccagaacaacccccagattcgttccaccttaaaaggtccttgagctctcactagaacaaccaaacaagagaacagaacattagagaaaattgcttgtctaaaatagacaaataattttcatttcatccttctttctgtgctccactttatctgtcttcttgctgtccctttttctatataagccaggcacgagggcgatattattcttctaaattctcaagatggattatgtaataatctagactgaaaaaagaaaaggcaactgcttggtaaatggacacgagtctttgcagctatttaaaaagataaagcccagatcatcctcgccttccagtactcagtagtagctgattgcccttattcttgggttttgcagagagtcccagctgggcctgtttggaactgtattgcccaacttccctgatgatcagaatcacctgggatgtttatgacattgcagcttcgtgggctccagtctagaccttctgactcagatttttcaggggagaggtctgcacatttacaaatgtaccttgtatttaggtctatacatttacaaatgtacattgtatttaatgagtggccctggatgattcttaacgtcaggaaaatatggtcaacattgttaatagaaggagaaagcctcagttttcaactgtgtttgcacattagggtctcctggggacctttaaaagctccaatgccggccgggcgcggtggctcacgcctgtaatcccagcactttgggaggccgaggcgggcggatcacgaggtcaggagatcgagaccatcccggctaaaaacggtgaaaccccgtctctactaaaaatacaaaaaattagccgggcgtagtggcgggcgcctgtagtcccagctacttgggaggctgaggcaggagaatggcgtgaacccgggaggtggagcttgcaatgagccgagatcccgccactgcactccagcctgggcgacagagcgagactctgtctcaaaaaaaaaaaaaaaaaaagctccaatgcccagttatatcagaattccaatcatcttgaaccacattcaggggtgagttgaaagacctctgacatggaccaagagtccagggttctgaaagagaaagccctggctttgtcactaattcactgggtagcatctctaggccccatttcccatacatacaaaatgaaggacatggactagcccaatgggaaaatactttctgtcctgtgtggcagtctggttgatgggtagccgctgtctgggtcacaatactgagaagagctctgaagcagggactgggctaaacaggagagtgccttgatggattaatgatgtctgccataggtgcacaggagaggtgttggctgatacattaacatgcaagagccaagtatccctggactaggtcttctgtaagggcccaattaagcctctgtgatgtaataataatgaacatagcaccaggttcattgtgatgcatagttgagataatctatgcaaataacaccttgcaatatttgaggtgctgtgcagatgttggctattataataatagttattattttagttcttggatgctacttcttcaacactttttaaggcagggccataaatagcaagtggcctgtctgggccagggtgggatgaggtgtgaggtcagaatgcaacattggaggccaggcgcagtggctcacacctgtaatcccaacactttgggaggccgaggcaggtgtattacttgaagtcaggagttcgagaccagcctggccaacatggtgaaaccctgtttccactcaaaatacaaagaaaaaaaaaatcagccagccgtggtggcgtgcacctgtaatcccagtttcttggcaggctgaggcaagagaattgcttgaactcgcggggagaggaggttgcagtgagccaagatcctgccactggactctggcctgggcaacaaagtgagagagactccgtctcaaaaaaaaaaaaaacaaaaaaatgcatcattggatgggtagtcgtatgggattacaggaatgaatagttgaaaatattagagatttcaaagctagaactctttttttcaacctgaggagggaaatgatagagggaagacaacatacggagttctagttccagcatacatctctgccccaaccagcctacggcccatagaatctttctactctcaggcacgattatacttaaggactccatccatccatccacacacacaccaacccatccacccacccaccccgctactcattcacccatacatacatccatttacccatttatccatttattgagcattttccacgtacctggcctacctaggtgctggaagttagtcagggctgctatgtttcacaacaccaggggacagcatttacaccgtggtcttcgcatagatccactggacacagagtgaacaagacagatggccgggtacagtgcctcatacttgtaatcccagcactttgggaggccaaggcgggtggaacacgaggtcaggagttcaagaccagcctggccaacacagtgaaatcctgtctctactaaaaatacaaacattagctgggtgtggtggtgggcgcctgtaatcccagctactcaggaagctgaggcaggagaatcgcttgaacccaagaggtggaggttgcagtgagccgagaccacgccactgcactccagtctgggcaacagagctagactcaaagacagacaaggtctttgctggcatggatctttcattctaaacaggggaaagataataaacaagcaaacggtgaatcggcaagatcatctgacatagtgatgagttctaagaaactgaaacagagtgatggggtgtgatgcactgtaacaggtggggataggctgggaacttagtttgaatgggatgcccaggaaaggcgatattggagtaaaagcctaaataaccagaaggagctttccaagtgaagttctaaggatagagcatatcagacagagggaactgcaaatgcaaaggccctgtggtaggaacagtgcttggtaccaaaagaatgccagtgtgggccgggagtggtggctcacacctgtaatcccagcactttgggaggctgaggtgggcagatcacgaggtcaggagattgacaccatctgactaacatggtgaaaccccgtctctactaaaaatacaaaaaattagccgggcgcggtggtgggcgcctgtagtcccagctactcaggaggctgaggcaggagaatggcgtgaactcggaaggtggagcttgcagtgagccgagattgcgccactgcactccagcctgggcgacggagagagactccatctcaaaaaaaaaaaaaaaaaaaagaatgccagcgtggctgtgttactagaaagtaacccaagagagggttcttggacctcaggcaagaaggaattcagggccaagtccatagaataaagtgaaagcaggtttattacagaagtagagaaacaaaagaatggcaactccatcagcagagcagcagcatgggttgctaaactgagtatactaatagttttgttggtttgttagtttgttttgttgtttgtttgggtttttttagatggagtttcgctcttgttgcccaggctggagtgcaatgtcgcgatcttggctcagtgcaacctccacctcctgggttcaagggattctcctgcctcagcctcccatatagctgggattacaggcatgccccacacgcccggctaatcttttattttttgtagagacagggtttcaccatgttggccaggctggtctcaaactcttgacctcaggtgatctgcccacctcagcctcccaaagtgctgggattacaggtgtgagccaccaggccaggtctgttatttcttgattatatgttaaacaagaggtaggttactggtgagttttctgagacagggttgggcaattcccagaactgaggattcctcccctcttagaccatatagggtaacttcctgacattgccatgacatttgtaaactgtcatggtgctggtgggactgtcttttggcatgataatgcattataatcagcatataatgagccatgagaatgaccagagggcactttcatgacatcttggttttggtggggtttgggcagcttcatcctgttttatcagcagggtttttgtgacttgtatcttgtgccaacttcctatctcatcctgtgactaagaacacctaacctcgtgggaatgcagcccaataagtttcagctttattttacccagaccctattcaagatggagtcgctgtggttcgaacacctctgacaggtggagctaagtgtatgaagagaatggtatgagatggtggaacttttggcttaagcaactgggtgaatggttgatgccatttcctgagaagggaagactgaaggaggaacagatgagtggagaattggctcaagagatctattttggctatgttgccttgaggtgcatgtaagatattcctgtggagatactgaataggcaattcaatttagtagtctggaactcagaggttgggttggaggtatggatttgggagctgtggtagacatggagtttcttgcccaatatctataccccttttcatgataactaccctaatgtatgttcctgtgtccatatctcccatacgcctggagggaaataacgccacccttgcactagtggtggaagatagaactcaagcccaggccaatcaataatcccaacttctggccttgtaagtggctctggagtgggcacttgaccctatttggagcaatacaattacagaagacgagtgtgagggttttctggttctttcaagagcacttgggaagaggcctctctctccctgaacatgaagaatcacatagccctagaagctgttcacagctatcttgcaaccacaagcacagccaggattacagtaacattgattcagtaaaaggtagagctgaggaatttggaaaaagagtagtaaaaatcctgacattgagtcaccaaagcccaccctgcctcagaattttgtgagatgcaaaattcactcaaatgtctaaactaggttgggttgaaatctctggtacacacacacacacacacacacacacacacacacacaccaactgatactagccatgggttagacgctgttgcctagggagagtgtggatgggcctgcacgtgagtggaccaggaggaaggctactgaaagttttccaaagaaggggtgctgggatccctggacgcagccatcctggaaattttcctatgtggagtctgggtctcttctagtgaagagaaaacctcaggtctttgtgccagacaagctagatttgaacagcctctgccatttgcttgtggaggagttttggcaacttgctgaacctctctgagcctcagttccttcccctattcaaaggaggtcacagtagccacatcatagggttgtgtgaaggttatgcagtataaaaactgtgaggtggggggctagctttctgcccctcctttctgccctctccttggtggtgacaagctgctctctctcaaagcatattgagggacgctgagtcattttttaaaactaaaaatgttaagtgctccctcaaatgactgtctccagagaagcagttgatagccaagcacatttgtccctccttttcatgcatggatcacattttagcatgaaaatagatgctctaattaggggagaaaggagccagcatctgctggctgctaagtgatggctcacaagggacagggaggaagggctgcttccagcacaggaatgggatgacctgtgggatggcatcccaccctgagaggtccctgaggggcagacccgaaggtgggaaatacagagcttttgctgaactggaagataattcctggagatgaggcagtcccagggggccaggatgctgattatggaggagtcaagcctgcctaactcctctccgcaaagggcagatagtgaggtcctcccaggccactgccatgagtcttgttatctatgaaggaggcatttcttggctgggtccaagtgtcagctctgcctctcactaactctatgacctgggcaatgcattgaatgcccttgtacttctgttcttccatccgtaaaacataaaattgggagagtcacggctgcttcaggtacactcataacccaatgggggaaggcaaacggtataactcctattaaggagaatgtggtcatttctagtaaaatgacatatgcaattgcactttgaccagcattcctgttaccagaaaggggtcctgatccagaccccaagacagtgttcttggatctcacacaagaaagaattcagggcaattccataaagtcaagtgaaagcaagtttattaggaaggaataaaagaatggctattccacagacagagcagtcccaagggctgctgtttgcccatttttatggttatttcttgaagacatgcctaaacaaggggtggattattcatgcctcccctttttagaccatatagggtaacttcctgttgttgccatggcatttgtaaactgtcacggcactggtgggagtgcaggatgacctaaggtcactcttgtcgccatcttggttttggtgggttttggccggtttctttactaccttgttttattagcaaggtctttatgacctgtatcttgtgccgacctcctatctcattctatgattaagaatgccttaacttactaggaatgcagcccagcaggtcttagccttattttacgtagcccctattcaagatggagttactctggttcaaatgcctctgacaatcctaccctctaagaatctatcccaaaaccacaatggcaaaaatacaaaacatatatactcagtctatttgatacagcatgatctgtactagaaaaagcctgggctgggcacagtggctcaagcctataatcccagcactttgggaggccaaggcgggtggatcacctgaggtcaggagttcaagaccagcctggccaacatggtgaaaccccttctctactaaaaatacaaaaattagccaggtgcagtggtgggctcctgtaatcccagctactagggaggctgaggcaggagaatcgcttaaacctgggaggcaggggttgcagtgagccgagatcgcaccactgcactccagcctggcaggagaataagaccctgtctaaaaaaaataaaaataaaaaaataaataaatgaaagaaagaaagcaaaagaaagaaagaaaaaggctggaaacaaccaaaatatccgtcaatcaggctgattgaataagctatgatccacctatataatggaatactatgcagctgctaaaaagaacaaggattatttctatgtgttgctttggcgtgattgccaggatacagtgttacatgaaaaaagtaagatggagaaaatatgtttagtatacagccatttatccaagaaaggagggagggaacacacacacacacacacacacacagacaccccacagaactttttaattgggaggatatttttaactggttacctctaagcaaggggaggtagagaatgaggtggaagggcaaagacagagtgtagaattctctgcaagcggttcacaataccattccctccatttttgtaaatatttggaatctttcataatgcaactttttatttttaaatgattttcctttctttacactggccagtggaccaaatggcacagaacagagccaccaccaacctaaagccttactttgggcttttctgtgagaaacagcaagccttttgttgtttcttgtttctatgactgaatgacatctatttgttctgcagcttcgctcactctaactaacacacaatcccaccatttatcttccaggtcttaccttggcctttccttcctggctcaaaacctgtgggttcacctcacaggtgagcaacctccagcttgacctcaagtccttcttttacaatacgttctcaaggagacagaagccaagagtctgggccctgcctcttccttagctccgaccccaggctcacaaaggaattggaggtacactggcagttctatatgattgctgtccacttattctatgagcaaggggacacttgttttggcccagtggttttcattattctccttctcctcctctccctcctccttctcctctcctttctcctgccacctctctcccctcctcaccctcctgcctccccaacctgctgttacatatgacttctagtaagtctccttaaaaggaagagaggatttccttcttttcccctaccccatcccactgcctgaaatgtgggtgcaatagctggagctctagtagccattttggaccctgaggacaagagtcacatcctagaagtgacagagcagagagctggaggaagcctgaatccctgataattctgtggcatcaccacaccacaccaggctcaggccacctacttctgaacttcataaaagatgtgatagtgtggtcgggcgtggtggcttctgcctgtaatctcagcacttagggaggccaaggcaggtggatcacttgaggtcaggaatttgagaccagcctggccaacatggcgataccctgcgtctattaaaaatacaaaaattagcagggtgtagtggcgcacgcctgtaatcccaactacttggaggctgaggcagaggaatcgcttgaacccagcagtcagaggctgcagtgagctgagatcaagccactccacttcagcctaggtgacagactgagactctgcctcaagaaaataaataaataaaaataaaagatatgatagtattagagaaattaacttctatttaagccattgttattttatgattaaaaaaacccaaacagtttaatctatcctaattgataagtctttactccccaacatcagctcaggtgtgcctctgcagggccccagactacactgaatactgttctggccataggaaaatcagctggttattgtgaactgtgctgactcttagagattctgcccagaacaaaacgtgtcaactctgctcacatcgtgttgaccaaagcaagtcatgtggccaaatcttatggcaatggggtggggatatagaatcccctcaaggggaagaacagggaatatttagaaataataatatgatccatcctaatagtcaacaaaaccaaggcccaaagaagcaaagtggcttacctgaggttttacagactactaggaggcagagttagaatcctggttgaggactagtatggtggctcatgcctgtaatcctagcactttgggaggccaaggtgggtggatcacctgaggtcaggagtttgagaccggcctggccaacatggtgaaactccgtctctactaaaaatacaaaaattagccgggagtggtggcaggtgcctgtaatcccagctactcgggaggctgaggcaggagaatctcttgagcctgggaggcagaggttgtggtgagccgagactgcgccactgcacttcagcctgggcaacaagagcaaaactctgtctcaaaaaaaaaaaaaagaaccctggctgggctgatttcaactctaatgctctttcctttacactttactatgtctcaaaaggaacacttgatttgggaacacataatggcttcgaagaaggcagtgttggtgaaatcaggctcacctactaggtcttatttccatgatttatccctttcctgcagtcttctttggggcagcagttataatcgccctctcttctcttcccctcttttgaagtccaaggtatcaaaatttattactacagtggagactaggaagtgcacccctgcccaacttgaggaaggataacaaaatgtgtggagcaatgtgtgaaatagccttcacatgcgaacacagatattcccagaggcaaaggcaacacagtgtgaccatattgggacctttccaatgaattcagatattttaaggatatagacaaaagtcaggaggaaaggcatattcctaagtggtatgcaggaaagaattatgggatattgtgggtctttacatttttctcctgtgttgtgagctgttctggttccttcatcttccaaaccactaattcgattttccacataaccaatccacctttcagtagtcaatgtattttaaatatttaaatttgcacagtttcttttactcccagaaactttttaaatgctgtaactgtatctcctcaagagtttttttttcctttttcagttaattttcttgtgtaattcttccattagttcaatagcagccacttgttcaactaacaaaaaaatgagaaaaaagaaaaagaagggaaagtaataaaaactctaataaagaaaaagcataaaataaaattggtaggaataaaattgagaatatcagttataataccaagagaaaagatggtcaaagtaaatttataaaacaaaatatcttatatacaagcatatacttatagttaaacagtaaaaagcgtagaaaataaagggatggaagaaaaataaagtagtagtggtgatgttagtatcagataaaatgaaatttaggatcaaagacattcaattggtcaaagaggaacattacataatgataagataatattctttataaagaagaggtggtaaacataaggccttatgaaccaaacaatatagcaggtaaatataatatttaaggcaaatactcctaatgatactaagagaatttaataaaaatttaggtatggtggaaaaattttaaatatccctttaagaatttgacaagtcaagtagttaaaatatgagcaaggacttatagaatatgagtgttctcattgataagcttggtttaatatgctagaattttttagactttttttttttttttttttttttttttgagacagagtttcactcttgttgcccaggctggagtgcagtggcatagtctcagctcaccacaacctctgcttcccaggttcaagcgattctcttgccccagcctcccgagtagctggaattacaggcatgtgccactacacctggctaattttgtatttttagtagagatggggtttctccatgttggtcagactggtctcgaactcccgacctcaggtgatccgcctgccttggccacccaaagtgctgggattacaggcatgagccaccgcacctggcctttttagtctattatgtattttttttatgttaatgacacagctaccaaagtcaattctaaacaactaaaaatgtaatggaaggcctgatagcataaaaccatcaattcttccaaattaatttataaatttaatgcaatttcaatgatatcttcaacagtcttttgaagagggaaggagtgattttaaagtaaatataaagaataaatgttccagaataaccaaccaaattatgaagatgaagagtagtaaaaggagacttgtcttactacatgttaaaaactactgtaattggccgggcacggtggctcacgcctgtaatcccagcactttgggaggccgaggcgggcggatcatgaggtcatgagatcgagaccatcctggctaacacggtgaaaccccgtctctactaaaaatacaaaaaattagccgggcgaggtggcgggcgcctgtactcccagctactcgggaggctgaggcaggagaatggcgtgaacccggggggcggagcctgcagtgagccgagatcgcgccactgcactccagcctgggcgacagcgagactccgtctcaaaaaaacaaaaacaaacaaaaacaaaaaaactactgtaattaagctgggcatggtggctcacacctgtaatcccagcactttgggagcctgaggtgggcggatcactggaggccaggagttcgagaccagcctggccaacacggtgaagccccgttgctactaaaaatacaaaaaaattaacggggcctgggggcgtgtgcctgtggtcccagctactcaggaggctgaggcaggagaatcacttgagctcaggaggcagaggctgcagtgatccaagatcacgtcacttcactccagcctgggggacagagtgagaccctgtcttacagtttggtatagggatagacctacaggtcaatggaagagaacagtctagaaataaaaccaaatatatgagaagtatgtcaaaggtgatatttcaatttggtggggaaaagattgtttagtcaataaatggtgctggcacaattggttactcatctggaaaaattgcaaaaacaaccccttactatatttggaaaaattaaattccagtcagattaaaatgcaaatgtaaacaatattattttaaaatttagcagcaaatttaaacattttatgtaactttagcaagataagaaatctgaatgttgtaaagaaaaagattacatttgactatgcaaaaataaactttgttcaaaaacctcacaaagtcaatgatagcacttgggaaaactactttcaatacatatgatgggtaaagtattaaatctgtaacatttcaagtacaccagaaattgataagaaaaagacagcctgggcgcggtggctcatgcctgtaatcccagcactttgggaggctgaggcaggtggatcacgaggtcaggagttcgagaccagcctggccaatctggtgaaaccttgtctctactaaaaaaaaaaatacaaaaattagccaggcttggtggtgtgtgcctctagtcccatctacttgggaggctgaggcagaagaattgcttgaacccgggaagcagagtttgcagtgagccgatatcgcgccactgcactctggcctgggtgacagagagagactccgtctcaaaaaaaaaaaaaaaaaaaaaaaaagaaagaaaaagacaaatattctgatagaataaatggatgcaaataggcaactcttggaagaggagccctaaatggccaataaaaatgatgttcaagctctcttggagtgaggaaatgaaaatgaaaggaacaaagaaataaaatcagattggtaaaacaaacaaacaaacaaacaaacaaacaagaaccccaaatgataaacttcaatcttgctaaggatgagtaaaattgggcactcaacattgctggtggggaatgttaattgctacagcctttttagagggtgacctgcattgtgtatctaataaaatacacaatgcatattccacatgccatgtttgtatacacatgctatctctgaaagcatatccgaaaaattggcaacagtgatcagtcatctctggtaaggggaaccatgtactggaaaacggggatgggagggcaacctgtatatcatgaatagtctttttacctttggaactttatgttgtatttgtatatattttttagctaacaaataaagaaaatatttgtaacattttgatttgaggtctttcctctcttaaacacaggccatctacagctataaatttccgtctagcaactgctttcactgcatttcataaacttcagtatgttgtgtttttattttcattcatctcaaaatattttctaatttcccttgtgaattcatctttgacccattaattattaaggactgtgttcatgtccatatatttgtaagtttctccaattttcttctatcattgatctctaatttcattctattgcagttgaagaaaatactttgtataatttcaatacttttaaatttattaaaacttgtattatggcccaacatatggtctatcttggagaatgttccatgtgtatttgagaagaatgtgtattctgttgttgtttggtggagtgttttatagatatctgttagatataattggtttagtgttgttcaagtccatttctttgttgatcttctagtttaagatctaattgttctacctgttgtttacagtggataattgaagtctccagctattattgttgaattgtctatttttctgttcaaatactaccagtttttgctttagtattttggagctcaattgttaggtgcaaatatgtttataattgtaatattttcttaatggattgaccctttttaaaattatttaaaatttcctttgtatcaataaacaatttttgtcataaagtctgttttgtctgatattagtatagccattctggattttttaaactgtttgtcgcctttttacttttttcatccttttgctttaaacctttttgtgtcttggaataacagatgtatttcttgtaaacaacatagttagataattctgccaatctctaccttttgattgaagtgttttgtgcacttatatttaatgtaattactgataaggtaggatctacatctaccattttgctatttgttttctatatgtcatgtctttttaattaatttatttttaattttgtggatacatagtagatatatagatttatggggcacatgagatgttttgatacagggatgcagtatgcaacaatcacatcatggagaatgggttatctatccccgaaagcatttatctatccattcctttattatcgcattttgtgttaaacaaattttttttttttgagacggagacttgctctgtcgccaggctggagtgcagtggtgcaatcttggctcactgcaacctccgcctcccgggttcaagcaattctcttgcctctgcctcccaagtagttgggactacaggcacatgccaccatgcccggctaatttttgtatttttagtaaagacggggtttcaccacgttggccaggatggtctcgatctcctgacctcgtgatccacccgccttggcctcccaaagtgctggaattgattacaggtgtaaatcactgcacctggccttaaataaatattttctagtgtaccattttatttcccttgtcacttctttgactattttttgaaaaattattttcttagtggttgctctggggattacaattaaagctttgcccctgtatattcccatttcctctcccctcttgtgcaaaaatttagactattaaaaatctgtgtgaaaagtttttactctttgtataaaatttacatcttttttatactgtatgccaaccaacaccaatttttaattattgttttatgctgtctttgaaatcaggacaaaaatgagtttcaaacaaaaaaatttatactgtcttttctatttacttatgtagttacctttacaagtgttctttatttctttatgttgatttgacttaccactctgtcctttcattgtagcctgaaggagtccccttagtatttcatgtagggaaggtctgctagtgatgaattctcagtttttatttaccggggaatgttttcatttctgcttcatttttgaaggatagttttagtggatataaaattctcagttgttttttaaatttcagcattttgaatatgtcatcccactgccttctgtcctccatggtttctgatgagaaatagttttattcaggatcgcttgtatgtaatgagtcatttctctcttgctgcttggaagatcctctctttgtctttgtttttcaacagtttagttatgatgtgtcttcaagtgtatcttttttacctaatcctacttgtagtttattgagtttcttggaagtgcagattaatgtttttcatcaaatttaggaagttttcatccattctttcttcaaaattctttctcttctatcccctttatctgagattcccatgggaccttgaagatctattcttttttttttttttggagacagggtctcgctctgtcaccaaggctggagtgcagtgacatgatctccactcactgcaacctccacctcctgggttcaagcaattcttgtgcctcagcgtgctgagtagctgaaattacaggcatgcaccaccacgcctggcttatttttgtatttttaccagagatggtgtttcgccatgttggccaagcgggtggcgaattcctggcctcatgtgatccacccatccccgccttccaaagtgctgggattacaggcttgagccactgcacctggccaaagaattgaaattaattggaaaaactgagtgtgctctggctgggaatcttttttctttctgtccctcagactggataacctcaattgacatatctttaaagttcactgatgttttcttctgcctgctcaaatctgctgttaaactcctcttagtaaatttttcatttcagttgtaattttcaactccagcatttagttgtttttaatatataatttgtttctttattgaaattctttgtttgttatcatactttcctttagttctttaggtgtggtttcctttagttcttgagcatattaaaaatagctaatttaggccaggcatgatggctcacacctgtaatcccagcactttgggaggccgaggtgggtggatcgtttgagcccaggagtttaagaccagccggggcaacatagtgggaccctgtctctacaaaaaaaatagataataattagccaggcatggattgcttgagcccaggaagttgaggctgccaggagctgtgatcgcaccactgtactccagcctgggcaacaaagcaagaccctgtctcaaaaaataataaaatataataaaatagctgatttaaagtttttatctagtaagtgcaatttgtgggcctcctcagggaacgtttccattaatgacttctctcgtgtgtataggccatgctttcttatttctttgcatgtctcatgatttttgttgaaaatgaacatttgatataatgtaacgtggcaaccctggaaatcagattcccctttccagggtttgttattattactatttctttaatgaatttcttgacctaattctataaagtctgcttgtattctctgtcaggcgtggccactgaactttctgatcagttaacttactggtcagctaatgaccggacagatatttcattaaatgcttggaaccagaaagtctcccaatctttgccaaggactctgtgtgagtttggggcatgcttcagtgctcagccaaacggcttagaatcctaccttaatctttactttctgtttgcacagtttcaaggccagccagaggtgagggctcagggccttctcaggtcttccttgagcatgtgcgtagccctgggcatgcacactgtcctgggcacatgcatggccttttagaatcccaggaatctatcagagcttttcctagccccctgaggatacctctttcctcaatttttccttttaagttttttggttactttgttgtttgtcctgtaattactgcctcagacagctatgatattaaacaatagctactgaaacgggtgcagtggcttacgcctgtaatcccagcactttgggaggctgaggcaggtggatcacctgaggtcaggagtttgagaccagcctgaccaacatggtgaaacccccgtctctactaaaaaaatacaaaaaaattagccaggcatggtggcgcgcacctgtagttccagctacttgggaggctgaggcaggagaatcacttgaacgtaggagccagaggttgcagtgagccaagatggcgccactgcactccagcctgggtgacagagtgagaccctgtctcaaaataataataataataataaacaatagctactgattatttttgacaaatgccctcaggaaaaaggctttttgtactgagcaagttctacatcaggtcaaataaagagagccttgcaagtggggttttccagggcactgagagacagttcaagtaggacaattttctgggaatggggctttgatagagtgccattccctgttgtaaccccttcagtagctggaagactgctcactttcaccatgattatagcctgttcgttcccaaggttaccatgaagctggagagaagagaacgggaatagcacaagttaatacccaacttatttttttccagatggctattcattgtccaaatactatttattgcaaagtctgtcttcccacccaccccctcgatttgcaatgcttatatactgtactaaattatccaatgaattaattctctccttttggacttcctagtttgttctctaagtttgtctatctgttcatatgccagtcccatattgtttcaattattaaggctttgaattatattaaaatagccagtaagaatattactttctcattgttttcctttttcacagttttcctggctgtccttggcttgtctatttttctgtatgagctttcagaatcaacttgtctggttaaaaatatattgtttgtatttttatttaatttccactgaatttataagttaattatatattaagaccttgtctctattagaaaaagaaaaagaaaataaattttaaaaatcacaataggaattagaaactattttgaactggataatacaaaaatactgcacatcaaaagttgtgggatgcaaagacatgcttaaaaagaaatttataagtttatttttatttatttatttatttatttatttttgagacagagtcccactctgtcgcccaggctggagtgcagtggctcaatctcagctcactgcaacctccgccttctgggttcaagccattatcctgtctcagcctcccaagttgctaggactacaggcacacgccacaacacccggctactttttctgtatttttggtagagacagggtttcaccatattggtcaggctggtctcaaactcctgacctcaggtgatccacctgccttggcctcccaaaatgcaaggattacaggtgtgagtcaccgtgcctggccttagaaatgtataactttaaatgcatatacaaatgctgttggatttactataaggttacatcctgatacacccatcataagttgaaaatattgtaagtcaaaaatacatttaatacacctaaattactgaacatcatagcttagcctagcctattttatgcgtgttcagaacacttacattagcgtaaagttgggcaaaatcatctggcaacacagcacaatgaagagtgacccgtgtttaccctcaggattatgtggctgactggcagctgcagtttactgccactgcccagcctaacaagagtattgtaggcatatttccagcctgggaaaagaccaaattcaaaatttgaagtatagtttctactgaatgcgtattgcttttcaccattgtaaagttgaaaaatcataagtaaacccattgtaagtcggaagccatctgtattagaaaagaaaaaagactgaaaaaccaaaatgttaagtgttcatgtcaagatgtcaacaacagaacagcaaattaaactcaaagaaagtagaaagaagaaaataataaaaagcagaaattaaatgaaatttagaaaacaaacatatactagagtatcaataaactacatgattatctctttgaaagaatgaggccaggtatgatgactcatttcctgtaataacagcactttgggaggccatggcagcaggattgcttgaggccaagagcttgagaccagcctgggcaatttagtgagccccacatctctacaaaaaattaaaatattagctgggcatggtggtgagtgcttgtagtcccatctactcaggaggctgaggcaggaggatcacttgagcccaggaagttgaggctgcagcgagtcattatcaagccactacactctagcctgggcaacagaacaagatcctgtctcaaacaaaacaaaacaaaacaaaacaagaatggaagggactgataaaccccaagtaagattgataagaaagagatagagatacagaaaaggcataaataatgaatggcagcaacgaaaatggaaatctcaccatagatttcacagatattaaaaagataagaaaaaagattgtgagcaactttataccaataaacttgaaagattaaatgaaatggtctgagcaggtgggttacacctgtaatcccagcactttgggaggccaatgtgggcagatcacctgaggtcaggaattcgagatcagcctgaccaacttggagaaacctgtctctgctaaaattacaaaattagccaggtgtggtggtgcatgcctgtaatctcagctacttgggaggctgaggcaggagaatcatttgaaccccggagatggatgttgtggtgagccaagatggcaccattgcacttcagcctgggcaacaagagcaaaactctgtctcaaaaaaaaatgtacaaattccttggaaaacacaagttagtaaaggtgacataagaagaaatagaaaacctgaatagtcatataactataaaacacatgtaatgcataaagtcaactgacaaagaaaacttcagacctggacagcgttactagcaaattctgccaaacacctaaggaagaaacaatgccaatcttgaaaattcttccagagaataaaataagagatattatttcccaacttattttgtgaagccagcaagagttttacaacaaaatctagccagaacacttggagaaaggaaaagtataggtcaatcccattcatgaatgtaggtgtaaaaattctaaacaaaatatttccaagcctatttatgaatgaccaagttggagttcttctaggaatgcaaagttggtttaacatttgaaaattaatcaacataatttatctcatcaacagcataaaggatacaaagcatattattatctcattacatagaggggaaagagtttttgataaaatttagcattcattcatgagttttgttttttttgttttttttttttttttgagagacaaggtctcactatcttccccaagctggtctgaaactcctggcctcaagcaattcccctgctttggcctcccaaagtgctgggtgtgacctactctacccagcatcattcatgactcttcgcaaaccaggaatggaaaagaacttccttaacttgagaagggcatcttaaaaaacctacagtaattttgatatgtaatggtaaaatattgaaaaatttccctttgagatcaggaacaaaataaggatgtttgctatcaccaattgtatttaacattgtgttagcctagtacagtaagacaagaaattattgaaaacgaagaaataaaactgtcattatttgcatataatatgatatatgatgtatagaaaagtcaacacagtaaaatccataaagaaaagcaagataagttttttgtttgtttgtttgtttgtttgtttttttgagatggagtttcgttcttgttgcccaggctggaatgcagtggcacaatcttggctcactgcaacctctgcctcctgtgttcaagcaattctcctgtctcagcctcccaagtagctgggattacaggcatgtgccaccaggcccaactattgttgtatttttagtagagatgtggtttactcatgttggccaggttgatctcaaactcctgacctcagatggtccactcaccttggcctcccaaagtgctgggattacaggtgtgagcctccacactcagcccagttttaagaattaataaataagtttagtaaggtattagaaacaagctcaatatacattaattccgtttctatatttcaggaaaaaacgtgaaataaaatagatgccatatgcaatagcataaaaatataaaatacctaagaataaatctaatgaaatatgttacaaagtaaatcgccaaagagtatgaaaaacaggaaataatatccaatggaggagtataccatgttcatggattggaaggctcaacattgtaaagatgtctattgtactcaaattattgtatagattcaatgtaatcttaatcaaaatcctaactttttcgtggagcttgacatgctgattaaaaaatgcatctgaaaatacaaagtaccaagaatagccaaatcattcttaaatgaggagaaaaagatgatgggagaactttttctataaaacaccaggaattattacaaagctaaagcatgtaatacaatgtggagtaaagacagaaaaattaatcaatggaataggttaggaaagcttagaaacaaactcagacatatgtgtgtgtgtgtgtgtgtgtgtgtgtgtgtgtgtatgtgatttacaacaaaggtagcattgcagagcaatgtagagaaatggcagtttttccaataaatgatgttggaaatatacattctttcaaagaaagaatatgtactatacagttccatttatgtgaagtgaaaaaatgtgagataaatgtggaaagagaaagaaagagcagaaaggaaggaaggaaagagggaggaagggaggaaagcaaggagagatggaaataactttttgagataacagaggtaaggttcttcaacacctcatggagggaaacactttttgaattaggtcaaaggaggtagcagccataaataaaatgattgctaaattcaattacattaaaattaagaacttctgattattaaaagatattaatgggatgaaaggataagccacagttgagagaagatatttgtaaccataaacgggtcacattcataatatattttaaaaattctttcacattaagaaaaaggcaaacaaccaaaaagaaaattaagcaagggatttgaaaaagaactttacaaaagagatatttaaatggacaataaacacatgaacagatgctcaacatgattattaataagaaagatacaaaataaaacacagtatgatactattccatatccaccagaatggctaaaatgaaactgacaataacaagtattagcaagcgtatagaacaatgttcatcctcccagcacgactgctgatgggggtgcaaatactaccactctggaaaactgacattatctatttatttacttattttgggaggacagggtctcactctgttgcccaggctggagtgcagaggtgcaatctcactgcaacctctgtttcctgggttcaagcaattctcctgccttagcctcccaagtagctaggatcacacgtgcttgctgccatgctcggctaatttttgtatttttagtacagctggggtttcaccatattggctaggatggtcccgaactcctgacatcaagtgatccacccacctcagcctcccaaagagctgggattacaggtgtgagccactgtgcccagcctggaaaactgacattactaaagcagaacatccacatagcctctgacccaagttcatccctaggcatatactcaatagaaatgcatgcacatgagcaccaagaaatacataatgtccacagcagcaccatttatacagccaaaaaccaaaaacaactcagatggtcatcagatatggaattaatatatacactgtggtatgtttagacaatgaatcagctatagcctcatacagaaccatggatgaatctcacaaatgtaatgtggaacaaaataaaccagcacaaaaggaattatgtataattccatttatatgaggttcaaaaccaggcagaactaaactagagttcaggggcacatgcttagtgagtaaagtcataaaagaaagccaggaagagattaacattgagattgtggttacttacatggggagggagaggtagagattgggaggcaatatgagggaggcttctggggtgccggaagtgatctatttctttccttgatctctgtgggtcggtgggttggggggcggtggtacactgatgtttgctttatgatcatccattaaagtgtaggtttttgttttattcacttcacataactatgttatctttaaaatatttttaatgtttgctatagataatattgctgccaatatttaataataaagacaagaatgaaaatcatggacaaaaatctttggtttgattagattatataattagcatttttaacttggatatctgttatcattttagcattttctcaaataaggtaatgtctagatgaatattgagtaagaaatagtgttagaaaagataaattaatccagaataagctgaagcctgtgaaatacaccaaagaaaacacaaagggatttttatttttatttttatttttatttttttagacagagtctcactctgttgcccaggctggagtgcagtggcatgatctcagctcattgcaacctctgcctcctgggttcaagtgatttccctgcctcagcctcccaagtagctgggactacaggtgtgtgtgccaccacacccagctaatttttgtatttttagtaggtactgggtttcagcacattggccaggctggtctcaaactcctaacctcaggtgatctgcccacctcagcctcccaaagtgctgggattacaggcgtgagccaccacccccagcccacaaagggatttttaaaggtctattcacagaaaggaaaaaaaaaaaaagtcaaggactgtccaaggcttggggattttgatataacagaaacagataatggggagaaagcaggactactcagcttttatttggcttccgtcttcatcaaggagaataattttcaaacaggaaaagagagaacagaccattacaaaggtgaaattaaaggctgaggtgtacaaagaaactgtcaaaatttgcgattgtgatcacagaatagttaacactgtgagaaatcagacaactgaagaggggccagaggccagaagacaagtcaatataatcacagctgcacaagggagggccaagtcaatgtacatccctggcaaaaatccaaagtaaggtacagattgtggacggttctaaaaaaagggacactcatctggagcctccagtgaatcagcaagaacaggtctcaccaaactgggctcatttcatccatttgcaacatcagaggattgaacatgttggatgtagtttatgtaggggtgcatgtggggattttttttttaatttagagataagatctctgtcatccaggctggagtgcagtggcatgatcattgtccactgcagtctcaacctcccaagctcaagcaatcctcccacctcagccttccaagtagctgggattacaggtgtagcccaccatgcctggcacatgggatttttatacattcgatatggttcagtaattttctagaagaatggggagatattgcaaatgggaagttaccccaattgggggtcctaaattttgactgggaagacacaggatcagtgaggataggataagtaatgctgcaataacaatgtaactccaaattgcagcggcttcaagcaacagtgctcatgtctcactcctgctgtctgcacacggcacagcagctggaggctctgctcacatcttcctcgttctgggacctaggctgaggaaacagccctcacctggagcatggctggtccctctggcagaaggaaagagagtacggtgagccacatgttggctcagaaaacatcacccaggagtaacaaggcaagtctcatggccaagcttaacttcaatgatagtgaacaaatgcttggggaggatgaggaaccaggaatgggtggtgaccagaattaatcacccccacagacctagtctgccagccatctgcaagccatctgcttgcacatcttgggtaagtgcaagcttaccccaacaggctttgggcaagaagaatcctggcagtgattcagcacctgatcggcgtcccaggagtagggccaagtcagaagtatgaactagactagcccatggctctggataaagagtgagggcagtatttcctcactccccccattctccatgcctgtccttcctcgtccccagtgcctctgcttatcctcatttctcatcctcctctttcccagcactcgtggatttaaggctctgaaatgatgtatacctgtttttacttagcattgcctttggcagcctctatacctcaaaaacaccataaaaagccaggcgcagtggttcatgcctataatcccagcactttgggaggccgaggtgggcagatcacttgaggtcaggagttcaagaccagcctggccaacatggtgaaaccccatctctactaaaaataaaaaaaagaaataccagccgggtgggatggcacatgcctgtagtcccagctactcgggaggctgaggctggagaatcgcttgaacccagggttgggggcagggacggaagttgcagtgagctgagattgcatcactgcactccagcctgggtgacagagtgagactcccactcaaaatatatatattattatacctgttaaaagaaaagttttattttatatatatatataccacttacccgatttgaaattggagagatgttccttgggctggttggtctgaggacctgaggtggtaggcggatctccccacggagtgagggcaaggacaggggactggtctcccaaaggagtcctcctatcccaggtcttcggcaccaaatgtcacacgcgtccgtgtgaagagtccaccaaacaggctttgtgtgagcaacaaggctgtttatttcacctgggtgcaggtgggctgagtccgaaaaagaagtcagcaaaggatggtgggattatcattagttcttataggtttgggataggtgtacaaagtacattctcaagggcagggagaatattacaaagtacctacttaagggtgaaggagaatatatcatatcagttagggtggggcaggaacaaatcacaatggtggatatatacatattttcgagatggagtcgcattctgttgcccaggctggagtgcagaggcaggatctcagctcactgcaatctctgcctcccagattcaagcaattctcctgcctcagcctcccgagtacctgagactacaggcgtgcatgcctggctaatttttgtacttttagtagaggcacggtttcaccatcttggccaggctggtctcgaactcctgacctcaagagattcgctggcctcagcctcccaaagtactgggttacaggtgtgagctgccatgcccagccaagaaaaactttagatgaattaattttaacagcgtttaatggagcaaagaacagtttgtgaattgggcagccctcagaaccagaaggggttcagagaactccgcaacgaggtccgggagtatttatgtacacaaaatggaaatgagatacagaaacagcttgactggttacagctctgagttcaccttgtttgaacgtggtttgatctgttggcatcctgagattggctgaagcttggctgctgtgattggccgagactctgacaatcgttacacaaaatatttactcataagttaggattttggtttgtttacatactgttaggttgcagttaattatgggctcaaggtacagagaaatcctcaggctaaatttagtttaatttgacatatcactgcctctgaatttcagcaaagaatttgccaagtcactcagggtgtcaggcctctgagcccaagctaagccatcatatcctctgtgaccagatggcctgaagcaactgaagatccacaaaataagtgaaaatagcctgaactgatggcattccaccattgtgatttgttcctgccccaccctaactgatacaatatattctcccccacccttaagaaggtactttgtaatattctccccacccttgagaatgtcctttgtacgcctatcccaaacctgtaagaactaatgataatcccaccaccctttgctgactcctttttcggactcagcccacctgcacccagttgaaataaacagccttgttgctcacaaaaagcctgtttggtggactcttcacacagatgcgcatgacacagggtatctttacaggcaaatggaaaagtgtgactggttaatagtaaaatcatgtgaggtcaagggaggcagaacaccttcaaagaggaatgattaaggaattagtgtaaactttcaaagcgggtgtttagtggtgtgccctcaaatattcagttcagaatacaacaaagtgatgctccagattaagaggaaaaaaagaatgattcaattttgtgaacactttgagaaaaaaaagtaaagttagaacttcaccataatatcctattccaaatcctgaatccctcagcgattaaggaggtaaatgtgaaacacaaattgaggtctgtaagaagatatagatacacatatggccacagaaaaaattttaagttgtgtaaagctttttgattcctcttccactcagtgaactattgagtgtgggggatggggagttgggaacaactattgtgtcccctcagcagctctcacaccctgagtgtcatggagttggcatcttgttgagctgagtgtgattctaacattaaaagacagatcacagctgggtgcagtggctcacacctttaatcccagtactttaggaggctgaggtgggtggatcacctgaggtcaggcactcaagactagcctgaccaatatgatgaaactctgtggggataggaccccaaatctggccataaactggcaccaaaactggccgtaaacaaaatctctgcagcactgtgacatgttcgtgatgaccacgatgcctacgctgaaggttgtgggtttaccagaatgagggcaaggaacacctggcccacccagggcagaaaaccacttaaggcattcctaagccacaaataatagcatgagtgatctgtgccttaaggacatgttcttgctgcagataactagccagagcccatccctttgtttcagtccatccctttgtttcccctaaggaatacttttagttaatctataacctatagaaacaatgtttatcactggcttgctgtcaataaatatgtgggtaaatctctggggctctcagatctgaaggctgtgagacccctgatttcccactccacaccctatatttctgtatgtgtgtctttaattcctctagtgctgctgggttagggtctccacgaccgagctggtctcggcaagtggtgcccatacatggggctcaaacccaggttgaagggtcaccagagtgacattggagaacatggaactaagctggaggacacctgagtactcttaagcaatccccgtggtgaataagaaggggagctaggaagcatcagggtaacaatgggacaaatgtaggttctggttaattccaccttggaaccttttcacactaacgatgaggaggaaggagagtataatgaagtaacagagcaggtttgtttgccagctaaagctaaagcagcaaaggagggagaggtttgtccctacccttctgtaccccctcattatttcaaagaaaaagagtggcctgaccctccagatctttcttttctggaggacactgggcaaaaagtagttgccccagtgactgtttgagcagtgcctcgagtgaccactctcagttctattcaggcaggaattcagcaagctagaagagagggtgatttagaggcctggcagttctctgttaggatacacccccacgatcaacagggaaatattatagttatatttgagctttttccttgtaaattactcaaagaatttaaacaagctattaattaatatagaccaggttctccttttgtaatgggactgttaaagaatcttgctgtctccagtcagatgttgccagcggggacggcaggattacttctaagcaggtctagtttaaatttaaaaggagtgcaagtacatacaggagtcattgattcagattacaatggggaaattcaaattgttacatctacttctgttgcctggaaagcagagccaggagagcatatagcacagctcctgattgtgccatatgcggaaatggggaaaatgaaattaaatgaacaggagggtttggaaacacaaataaacaaggcaaagcagcttactgggtgaatcaaattactgataaatgtcctacctgtgaaataactattcagggaaagaaatttaaaggtttggtagatacaggagtggacatttcagtcatttctctacagcactggccatccatgtggccagttcaacctgctcaatttaacatagttggagttgataaagcccctgaggtatatcaaaatagttatattttgcattgtgaagggtcagatggacaacctgggactattcaaccaattgtacctataaatttgtggggaaaagatttattacaacaatggggtatgtccctggtatgggactaggaaaaaatttgcaaggtttgaaggaacagcttcaagtggaaagacaaagttccaaccaaggtttagaatataatttttgatggcagccattgttaagcctccagaacctatacctttaaaatggttaacagatatgccaatttggatagaacaatagccactgagtaaagagaaacaggaggctttagaggacttcactgctgaacagttagaaaaaagacacatagctccaacattttccctttggaattctccagtttttgtaattaagaaaaaatcaggtaattggagaatgctgacagatcttagagccattaattcatttatacaacctatggggacattacagccaggattgccttctcctgctatgattccaaaatatcagcctttaatagtcgtagatttaaaagactgtttctttactatccccttagctgagcaagactgtgaatggtttgcatttacaattcctacagtaaacaatctgcagcctgctaagcattttcactggaaagtgttgccacaaggcatgttaaacagtccaacaatttgccatacttatgtagggcaagcaattgaacccattcataaaaaattttcacagtgttacattattcattatatggatgatatatttgtgctgctcccactcaagaaatattactccaatgttatgatcacttgcaaaatttgatttcttgcactggtttaattatagctcctgacaaaattcagactactactccttactcctacttggggaccttagtaaatgacaccaccattgtgccacagaaagtaaccatatatagggatcaattgaaaacattaaacgacttttgaaaattactaggggacattaattggatacgacctgttctaggccttcctacctgtgccatgagtaatctattttctatccttagtggagatcctaatctcgctagcccttggcaattaacaaaagaagctgaggcagagctgcagctaatcaaaaagcaagtctataaagctcaaataaatagaatagatccagagaagactctagatttgctatttttttcaactcagcattcacctactggtgttattgttcaagagcaagatcttgtagagtggctttttcttctacgtactaattcttggactttgattctttatttggatcaaatcactactataataggaaatgggggaactcggattgttaaattacatggatatgatcctggaaaaattattgtccctctcacgaaggcacaaatacagcaagcttttataaatagtcttacttggcaaacacatttagctgactttgtgggtattctcaataatcattttcctaaaacaaaatttttatttcaatttttgaaattaactaattggattctccctaaaataactaaatttaaacaaattgaaggtgctgagaatatttttacagatgggtctagtaatggtaaagcttcttattctgggtcaaaatgtaaagttttccagacaccctatacctcagttcaaaaagtggagcttgtagctgtaattgaggtgttgactgcttttgatatgcctattaatgtgatttctgattcttcatacatggttcattccacacaattaattgaaaatgctcggttatgatttcatacagatgaacaactgatgactttatttacccaattgcaaacagcagttaggaatggaatgcacctgttttacatcacttacattagggctcatacacctcttccaggacctttaactgcagggaatcaaatggctgatcacctagttgctattacaataactaatgctagacactttcacaatttaacccatgttaatgcctctgctctcaaacgcagatacaacactacctggaaagaaactaaagctattatccagcaatgcccaacttgccaaatggtgtattcctcatcttttacaggaggagttaatcctcaaggattggagcctaattctctttggcaaatggatgtcacacatgttccctcatttgggagactagcttatgtacatgtatgtgtggacaacttttctcacttcatctgggctacatgccaatcaggagagtcttctgcctgtgttaaacatcaccttttgcagtgttttgcggtgatgggcattccagcttctattaaaacagataatgccccatgctatattagcaaagctctagctacatttttctctatatggaatattaaacacattactggcatcccatctaattctcaaggacaagccattgtagaaagaatgaatccctccctgaaacagcagttgcaaaagcaaaaagggggaaatagggattacaggacaccccatatacaattgaatctagcattattgactttaaattttttgagcctgcctaaaggccagatgctatcagcagctgaacagcatctacagaaaccagctgcaaagacagaagcagaacttctggtttggtggagagatccaataacaaaacgggtaaaataataacttggtgtagaggttatgcttgtgtttctccaggcaagaatcaacaatcaatttggataccatcaagacacctgaaaccttatcatgagccaaatgctgaggaagagattccgggggggatcccccagttgcagtcatgtcaagactgatgctgaggaggaccccaactgtcacgagcaacacctgtcaaacacagccacctacctggggacaaatcaagaagctgtcacagacggtggaagaaaacctgaggaaagcaggacaaccagtcacaataagtaatttaatgatagctatgatagcagtgatcaccattgccatgagtattccttcaacaagggctgacacagagaacaattatacttattgggcatatttatcaatcttggctggcaataatgcctggatgcaatcactctgtgacacagttacacaggctttctgatctcagtatttgccataataaatctgctcctataattgaggcatacctccctcaaaaacctatttctaaacagaattggaagattgcattggagaacaggcagaagtgctgcacaacaattcctatggaatcattattgattggtcccctaagggaatgtttagcttgaatttcacctctcagtctgcatgccacggccacactatgttcagctggtctaaacaaaatggtcagatggtagaaatggtaagaaatacagcaagagttcctattatctggaaacatggtggtacagtgccacctcaacttcaaatgatatggcctgctgtaggagctaaacacaaagatttgtggacactattaatggctcttaaataagatcaaaatttgggaaagaataaaaaagtatctagaaggacactcgacaaacttgtctttggatgttgcaaaattaaaagaacaaatatttaaagcatcccaggcacacctgatcttaatgccaggaacaagagtgcatgaaggagccgcagacagattagcagctattagcccattaaaatggatcaagacacttgggggctctgtgatttcaatgatgattgtgctttttagtctgtgttgtttgtccttttgtagtctgcagatgtggatcctgactcctgcgagaagtagctcaccgtgacaaaactgcctttgcttttatcgctttgcaaaacaaaaaagggggacatgttggggataggcccccaaatctggccataaactggccccaaactggccataaacaaaatctctgcagcactgtgacatgttcatgatggccatgatgcccatgctgaaggttgtgggtttaccagaatgagggcaaggaacacctggcccacccagggtggaaaaccacttaaaggtgttcctaagccacaaacaatagcacgagcgatctgtgccttaaggacatgttcctgctgcagataactagccagagagcccatccctttgtttcccataaggaatacttttagttaatctataatctatagaaaccatgtttatcactggcttgctgtcaataaatatgtgggtaaatctctgtttggggctctcagatctgaaggctgtgagacccctgatttcccactccacaccttatatttctgggtgtgtgtctttaattcccctagcgccgctgggttagtgtgtccaccaccaagctggtcttggcaaaactctttctctactaaaaatacaaaaattagcagggtgtggtggcatgcacctgtaatcctagctacgtgggaggctgagacaggagaatcacttgaaaccaggaggcaaagggtgcagtgagccaagatcacgccattgcactctagcctgggcaacaaaagagaaactctgtctcaaaaaaaaaaaaaaaaagacatcatatttcacacagtgcggcctcagtgcaagccaactacttcccccagagcttaaccaaagaaaccatgatccattgcagtaactgaggaaaaactggccgtgttgtactaaacaccagacaatgtctccagcagtagtagtgccttctgtgcatgggtttcagctcacacttaggctaaaaatctggtatctggctgaccttcccactcctccccactcttctccagcagccctcttcccccaaccctgctctactttttttcctcagtattatttgtcactttctaccatgttatataatttacttgtttattatgtttattgtttattatctgcccccccatggggttcagagcatgtcaccccaaaatattccactttggcatattgattattttgagcaaaaagaaattgagaatcagccattgtaggaaaagttctttaccgcccactccgatcagttcactaagctgcctaaaatagagatttcccttttagtaaaggaaattgatttttatttatttatttatttatttgagacagagtctcactctgttgcccaggctggagtgcagtggcgtgacctcagctcactgcaacctccacctcctgggttcaagtaattctctagtctcagcctcccgagtagctgggattacaggcgcccaccatcatgtctggctgatttttgtatttttagtagagatggggtttctccatgttggccaggctggtcttgaactcctgaccttaggtgatccacctgcctcagcctcccaaagtgctgggattacaggcatgagccaccacacctgaaaaaattaactttttttcttttttctcaagacagagtcttactctgttacccaggctggagtgcagtggcgtgatctcagctcactgcaacctctgcctcctgggttcaagcaattctcctgcctcagcctcccaagtagctgggattacaggcgcctgccaccacgcccagataatttttatatttttagtagagatggcatttcaccagattggccaggctggtcttgacctcctgacctcaggagattcacccacctgggctccccaaagtgctgggattacaggcatgagccactgcgcccagcccagaaattgacttttataaaggaattttttttttttttttaatttggagttttgccctgtcccccaggctggagtgcagaggtgcaatcttggctcactgcaacctctgcctcctgggctcaagtgattctcctgcctcagcctcctgagtagctgggattacaggtacctgccaccatgcctggctaactttgtatttttagtatttttgtatttttagtagagatggggttttgccattttggccaggttggtctcagactcctgacctcaggtgatccacccgccttggcctcctgaagtgctgggattacacctgagagactgcataactaggcaacttttattcaccatacactccacactcctcccttatgtttcccataatttgtctcttccctgccccttcaaaagcctcaaattcttgttcctttctgtagcttaggatgacacataagcctcaattacctgactgccttctttatttttatctttttttctcccttttaattttaagagatggtgtctcactgtcacccgggctggagtgcagtggcttgatcataggctcattgcagcctcaacccctgggctcaagagattctccacctcctcagtctgccaaatagctgggaccacaggtgagcaccaccatgcccaggggctattttttgtagagacagggtctcactttgttgctctggctggtcttgagctcctgggatcaagcgatcctcccacctcggcttcataaagtgctgagattacaggcataggccattgcctggtcctggctgccatttccccgccccccactccccctgagacgagtttggctcttgttgcccaggctggagtgcagtggtgcaacttcgtctcactgcaactcccacctcctgggctcaagcgattctcctgtctcagcctcccaagtagctgggattacagccatgtgccaccacgccctgctaatttttgtatttttagtagagacagggtttcaccatgttagccaggctggtctctaactcctgacctcaggtgatccacccgcctggacctcccaaagtgttgggattacaggcgtgagccactgcgcccggccacaaggtttctcttttaacaaaaagtagcccccaaataatttcttttctaataaagagcaggctgaaaagttgagctgcagatatagacaagcaagctggaagcttgcacgggtgaatgccggcagccgtgccaatagaaaagctctaccctgagggcctgacatattcaacatggaggctccagcttcccttttctttgtcaccacgtgtacagtaaaaaagcaggcaacatggccctggccaggtagcgaacccatctgcataatacaagattcaggtggggggccagcttctgcacatgctatggcaacaacacacctagtcctaaccagttcttcgtgcactatgcaaatggcacacctggtccaacaaactttttgtgccctatgtaaatcagacaccgccttctcaagctcatctataaagccttctgcatttcaccacataaccagcaacccattttctcatccctctctgcatggaaaaccttctgcatttcaccacggaagcagcaacccattttctctgggacccatctctagcagagagctcttctctttcgcctattaaacttcagctcttaccttcattctggtgtgtctgcatcccagttttctgtggccgcgggacaacaaacctggggtattaccccagacaacgatgctgcttcaacatgtcgtgctcccttttttttcttgagacggagtttcgcccttgttgaccaggctggagtgcaatggtgcagtctcggctcactgcaacctctgcctcccgggtttgagtgattctcctgcctcagcctcccaaatagctgggactgtaaggcacctggcacctgcccagctactttttgtatttttagtagaggcagggtttcactatgttggccaggctggtctcgagctcctgacatcaggtaatccacctgcctcatcctcccaaagtgctgggattacaggtgtgagccactgcacccagcctgtcttgctttttaaaatggtttttaaaattaatatgtaccattgtcagaggtgtttgaaccacagtgactccatcttgaataggggctgggtaaagtaaggctgagacctactgggatgcattcccaggaggtcagacattcttaatcacaggatgagatagaaggtcagaacaagatacagtcacaaagaccctgctgacaaaacagcttgcagtaaagaagccaaccaaaacctaccaaaactaagatggcaacccaagtgacctctggtcatcctcactgctcattacacactaattataatgtattagcatgctaaaagacactcccaccagtgacatagtttacaaatgccgtggcaatgtcaggaagttgtcctatatggtctaaaaaggggaggaaccctcagttccaggaattgctcacccctttcctggaatactcatgaataatccaccccttgttttgcatataatcaggaaatgaccataaaagtggacagccagcagctcttggggttgctctgcatatggagtagccattcttttattcctttcctttctttcttttttttttttttttgagatgcagttttgctcttgttgcccaggctggagtataatggcaccatctcaactcaccacaaccaccacctcccaggttcaagcgattctcctgcctcagccttccgagtacctgggattgagaggtgaagccagctggacttcctgggtcaagtggggacttggagaacttttctgtctaaaggattgtaaatgcacaaatcagtgctctgtgtctagctaaaggattgtaaatgcaccaatcagcactctgtaaaaacacaccaatcagcgctctgtgtctagctaaaggattgtaaacgcaccaatcagtactctgcaaaatggaccaatcagcactctgtaaaatggaccaatcagcaggatgtgggcagggccaaataaaggaataaaagctggccacctgagccagcagcagcaacttgctctggtccccttccatgctgtggaagctttgttctttcgctcttcacaataaatcttgctgctgctcacttttgggtttgcaccaccgttaagagctgtaacactcaccatgaaggtccatggcttcatccttgaagtcagcaagatcacaaacccgccggaaggaagaaactccagacacatccgaacatctgaaggaacaagctcaggacacaccatctttaagagttgtaacactcaccgcgaaggtccgcggcttcattcttgaagtcagcgagaccaggaacccaccagaagtaataaatttcagacacaggattatgggcatgcaccaccatgcccagctaattttgttttttttagtagagatggggtttctccagttggtcaggctggtcttgaactcccgacctcaggtaacccacctgcctgagcctcccaaagtgtattcctttactttcttaataaacttgctttcactttactctatggacttgccccaaattctttcttgctcgaggtccaagaactctctcttggagtctggatcaggacccctttccagtaacactgtcatgatgaagtgtgtgacacattgtcaagtgaaaagaacaggttctaaaatattgatctaatgttgtttaaagatgtgtagaaaaactataagattttttttccaagggtaacctgtcagtagatcaattgttgaaatgacaattatcagtaccatattattattattattattattattattattattaatgttgtctgtaggcattcaggagatagcacagaggtcctgcccaataatccagaaatctcttcatatttttactgattgtcataattactgctgttttgcattttattatgatggttttttaaaaagtttcctataatagatgaagactagtgtatatatcttcattcttcactctctaccagcatattgtaaatacttaatatttttaaccctaaagaaaatatgaacgatgcaaaaaaaaaagtataaaaaagtatctgaggccaagtgtcgtggctcacccctataactgcagcactttgggaggctaagtcctgtgcaacgtggcaaaccctgtctctactaaaaatacaaaaaaaaaaaaatagctggggatggtggcacatgcctgtagtcccagctgcttgggaggctgaggtgagagaatcacttcagtctgggagatgaaggttgcagtgagctgagataatgctactgcaccccagtctaggcaacagagaagactctgtcttaagaaaaaaaagaaaaagaaagcatccggaaaataacactaacattagcttgtctttggacaattcgattatgattgagttttcttttgcttctctgtatttcatcatttttctataataaacatttacagattgaacatgagataagtaatttttaaccaaaaatgaacaaattaacagaattaaaaggcaaacaacaaactaggaaaaataaatgcaatatagtatatgtaattgacaaaggattatgattcatgacagttaattttacatgtcaacttgacagggccatggaatgctcagattaaacatttctgggtgtgtctgtgagggtctttctgggtaagattagcattcaaattagtggacttggtaaagcagatttccctcccctgcattgatgggaatcatctcatcctggcctgaatagaacaaatgacagaggaaaaagataggttaaaagattagtttggatcctctagtagaagatctctctctctttctttctctctctctctctctctgtctctctatatatagaccccctcaatggtgggggtgttggagagccccagtggcccagagcagactgtcagatcccaaacagggtgaaaacggcatccacagagaactggcccacatggggtgctagaggcagagcagggcgaggagggggccagtagaggaggccagtgcagcatgggtgtgggagcccacatagagtaaggaggatgttcccccaaagggtgcctggtgcaagaagtcaggcttgagagggttggggtggggagacacgctagcagggcagggagggcatccacatgggggcagtccagcatatggtatcagatcccaagcatagcaaggggcatttccatgcagggatgggtcagggagaagcccagcatgggagctcagtgtctgagtggggtgaggagcatgctaggcagtgggaggtgtggctaaacatgggatgctggagcctggtggggtgaggagagcgcccatcccagtggcccagtgagtgatgttgaaacacaggtgaggggaagagagtgtctatgtagggaggggtcactggcaccttgacacaagattttagagcccaagaagagtgaaggggaaggaggcagcactggtgatggaagagtgactacaaacaggagacttgatcaaataaagataacaggaacctgattaccctctaacagtgaagacagagaagggagttacaaatatggaagaaagaaaatgttaataagtccgggggcactggattgaaatgagaggtattagtgtgaattcatgatttttcaatacacatgttgatatataaatataagtgtgtatatgtatataacatataaatacatagttcctagctctggactgggagcagtaacgccctaagaacaatgagcacatgtaatgcccagattttggcttctacataccattccccaaaaaagcaaccagatctccctgggaaagtggctgattctaagacttgcggggagagtacaagatgagcctgaaagcgaaagaaagtgctctaagaatgagaaatatgtcaacagggcgtagcattcaccttcaagggcccctgctagcgaaatctgtggcaatttaagcatcaaaataaataatgagcgcaacagattataattcattagataaaataacaaactatgcatttgtatgaatagaaatgaatacattgaaagccacttgataggatgcaataagaacatgttagcacatttgtggtatcactgccaaagatacataactgaatcccgtcatgaaggaacaacacacaaacccaaagtgaggcacatgctgcaaaatagctggtctataatcttcaaaagcatcaaggtaatgttaccaaaacactgggcatttggtctaggtcctgctcctcgtggcacagaaaggcaatcactgagacactaagtattgccaaggaagaaggctttatcgggtgctgcagcagaggagatgggagctcagcctcaaatctatctccctgattgactaaaactaggggtttatacagcagggaagaaatgtaacaatgtataagaaaacaagaactaggaagggccaaggaggtatctggtggtgatcaggtgagtttcagttctttgatccttttcttgagaggcctaaaggtcctttcctgaggaaggaagttggataaaacagatacaaatttcaagctgtaacagcagaagggtcaatttctatatttatccaaaaacaactgtctatgggcctactgggcaagtttcagtaatatgagttttgtcaagactgaggaactggttcagactggagtagactgaggttggtcctgaagtggatccttctactataaagaatattttgagaacaggaggtcaagcttaaataaagtctgaggatttgatggaagcagtgtattactcaagctatcatagctgaataacagaccacttagtgaaatttagcaccagacatttgtgggtcaggaattcagaaagggctcaacagggacagtttgtctttgccccaggaggtctggggcctcatctgagaaaacttgagcctgggggtaattctatggctagggtctctggaaccatctaaagtcttgctcactcaccagatgcctccttggccctccctacttcttattttcttacacattgttacatttcttctctgctatataaacctctagttttagtcagtcagggagatggatttgaggctgagctcccatctcctctgccgcagcacctgattaaagccttctaccttggcaatacttggtgtctcagtgattggctttctgtgtgacaaactcacatgcctggtgcctgggttgggaaaactccaagaccaagactgctgacaggggcacctacaggtgtcctctccatatatccagcttcctcacaacatggtggcctcagtcagatttcttacatggaggctgtgggctccaagaacaaatattccagcaaacaaggcagaagttgcatcacctttcctgtcttggccattgaagccaccttctgttggttacaagcaagtcaaaaacctgcccaaattaaagaggaaggagatatagaccctcatctctctatggaggagtgttgaggtcacgttgaaaaagaatatgtgaggtttaacatactgctgcagctgtctttggaaactacaatctgtcacaaatatcaatgttcatttcctgattttgccagtaggactgtggcaatgtaggaaacatacagtgaagttttttgtttttgcttttttgatggagtctctttttgcccaggctggagtgcagtggcgtgatcttggcttactgcaacctctgcctcctggattcaagtgattctcctgcctcagcctcctgagtagctgggattacaggcacacaccaccacacccggctaatttttgtatttttagtagagacggggtttcaccatgtgtggccaggctggtctcaaactcctgacctcaagtgatccacctgccttggcctcccaaagtgctgggattacaggtgtgagccacagcaccctttctttaatagtgcagtatttggaggcagggtggtatggtacatcagatctcaagtggttcaggaaataaaagactttaccctgtattcacaacttttctgtaaatttgagatggcttcaaaatacaaaatacatactaaaagtttagtaggaaaaagatggacattctgatagaaatagatggatgcttgaatagacaaatcacaaaagaataagaacaagtaactgatgtttaattaaaacgttcagttatagttatcaaacaaaggcaaatttaaaatagcaagaatatgtcattttgcataaatgtttaaatgataatacaaaatattggtgaaagtgaaggaagggcattacccttcgggaaagaaattcagcaatgtatgtaattccccaagaaattaaatgatcatttgtgacgacattccaaatggctccatgaaacatcacatgacacatgtgccataattacttcacccaatgccttaatattgactatttagtttctttaaacacatacaaatgatactgcgataaaaatatttatatatggccagttatggtggctcatgcctgtaatcccaacacttttggaggccgaggtaggaggatcactcgaggtcaggagttcgagaccattctggccaacagggtgaaaccccttctctactaaaactatgaaaaatcagctggatgtggtgacgggtgcctgtggtcccagctactcgggatgttgaggtgggaagattgcttgagcctaggagttcgaggctgtagtgggctatgattgtgccacttcaccccagcctgggcgacagaatgagactccatctcaaaaaaaaaaaaaaatatatatatatatatatatataaaacttcacactcatctagaagaggaattattaaaaactaatcccctgggggaccttgaggcacttctgtcttgttactgagtctgttttaatgtaaaatgtgtaaaatgtgttttaacatttttacattttaacaaaattccgtactggtctgttccccaccagggctgcccctctcctctgcctggcctccagaagagtaagtatcacagacccagatgtccgtggcccacagtccagcccagcctgggaacagagcctctcaattataggctgagcaccttaaatgactggctcctcaagagtctgactaacacttggagaggcagaaaacaagctgtgtcaagcggcaggagcagcagggcttacatgggtgctacctccccagcctccctggaggggctgatttgggtcacttagctacattgcaggatgatcctcacccactccactggcacatgagtcttcctgagtcaggggcaccattctctcaggccttttctctttccacagggcagtcctgcaggctgcaagggctccatgagtacctcgtgccgtgagctcacgccaccacatcaaaaacctcacagtgggccgggcacagtggctcacacctgtaatcccagcactctgggaggccaaggcgggtggatcacttgaggtcaggagttcgaggccagcctggccaacatggtgaaacccccccccccgatctctactaaaaatacaaaaattagccaggcatggtggtgcacacctgtagtcccagctacttgggaagccgatgcagaagaatcgtttgaacccaggaggcagaggttgcagtgagcaaaaatggcaccattgcactctagcctgggcgacagagtgagactgtgtctcaaaaaaaaaaaaaaaagcctcacagtcagctactctccttcaaatgcatccctccctggagccttttggggcctgcatgtccaggtcccagtcactgcccacctccctgattccctggtgcagctgccaaccacttcccagccccctggctgactccacttatactctctatcccagctcctaccctagccttctccagggactttggtatttgtaatacatgaaattgacaaaggagtagctcccagaatatataaagaactccaacaaatcaaaaagaaaaggatacattgattttaaaatgagtaaccaggtgtggtggtgtaagcctgtaatcccagctactcaggaggctgacacggtagaatcactcgaagccaggaggtggagtttgcagtgagccgagatcgcaccactgccctccagtctgggcgacagagcaagactctatctcaaaaaaaaaaaattgaaatgagaaaataatatgaactgcagggcaaagaatatgaaatgtagaccatagaagaggaagcccaataaatgtcaataagcacatgaaaggttaacttcacctgcgaaatgaaattttaaacaacactgagacaccatttcacacccaccagcttggcaaacatgttttaatttgacaataccaagcaccaggcgaggattatggaaagacagaaacttttatacacagatgacagtactataaattggaacatctcttttggaagcaatttggcattatttcataaagtttaaaatgtgcgggggcaatgacccaagtgcagtgaattaaaggtgaatataaattctttgccactcatcccagtgacaggtggagtctattttgattctcctcgaatctgggctggactgtaacttcttctgaccaaaagaatgcaacagaagtaatgttgtgtcactgagtctctccctctttaattctaggataatcctaggttgggagctaataatttcagctattataagatgaatgattaattgcctaaaattgaaacagctcctaggagaagattttatgccaggattgtttagaatttgtactctctcgtgggccaagatgcccatctagttctctgaatgaaagctttcaggagctgtaatttcaaggccaagccctaagagatctgcagcctccccctttgtgtttaaatgttccttctttttggaactcgacatcatgctgtgaggaagtccaagctcccttctgtggaaagaccacagagaggagcactgaggcaccaaccctgcgagggaggccattctggaacttccagctgtcccagtgctccagctgacaccatgtgcaacagaagacccatccacagtaatgaattatgatcactgtgagctataggttttgaggtgatttgttatacagcaataggtaactgaaacacagaaattcttctcctaggtgtacactctaaaaaaactccctcccatgggcacaatgacacaggcatatatatttttactgaagcatcgactgtgatcgcaaaaattagaaacaagcaaatgtccatcaataggaacatgggtaaataaattgtggaattgtcatgtgatggaatactatgtagctcttaaaattaattaatcagagctacatagtcagcaagtgtagagctcaataacaaaatattgcatgaaaaaatgagagtgcacatgataccttttatgaaaaagttaaactcatgcaaaacaatgccatgtgttgtttatgggtgcacgcatacatttaaagtacaaacgtgcagaatgagaaacaacaaattcaggataccagtctcctgtggagcgggcaggaggatgggggtgaatgacactagggagggcttatggagagctttaagtgtgtctgtgaggttatgttccttctatttaagatatgaaataaatatggtaaagtgccgaaatttggcagagctaggaagtgcttgatattctgatgctaaaaagacttcattttatgaaaagaaagagagacaaaaagagaggaggaaggaaggaaggaaggaaagaaggaagggaggaagggagggaggaagaaagaaaagagcatggggcctggcacagtggctcacgcctgtaatcccagcattttgggaggccgaggcaggtggatcacgaggtcaggagttcaagaccagcctggccaagatggtgaaaccccgtctgtactaaaaatacaaaaaaaaaaaaattagctggtcatggtggtgggcgcctgtaatcccagctacttgggaggctgaggcagggaattgcttgaacctgggaggcagagtttgcagtgagccaagatcgcacgactgcattctagcctgggcaacagttgagcgagactccgtctcaaaaaaaaaaaaattagctgggcatggtggcgggcacctgtagtcccagctacttgggaggctgaggcaggagaatcacttgaacctgacaggtggaggttgcagagagcagagatggtgccaccgcactccagactggcaacagagccagactctgtctcaaaaaaaaaaaaaaaaaaagaaagaagagcatgaaagaatgaacctccatcctctgcccaatgtcacacagctcataatggcgggtcctggagcctcattttcatcacagtgtgtgtccactgcattctatacttccatcagtcccacagggaggcagctccactcagaacacactgtttgatgcaaagtctggggggtggataaggttcaaggtcttcaacctaagtactttctgtgatctgatgtttgtgtctccccaaaatttgttgaaatgctgactccctagatgatggtattaggagggggagcctctagaaggtgattaggtcatgagatgagagtcctcataaaggggatgtgttagtccattttgtgttgctataaaggaagacctgaggctgggtaattttcaaagaaaacaggtttatttgggtcgcagctctgcaggctgtacaagcatggcaccaacaccactcagctcctggtgaggcctcaggaagctttttctcatggaggaaggtggagggggagcaggtgtgtcacatggcaagagaaagggcaagggggtggggggagagagagagagagaggagaagaaggtgccaggctcctttaaataacgagttctcgtgtgaacagtgggaactcattcatcaccaaggagagggcaccaagccattcatgagggaatgacccaaacaccttccctgagcccccacctccaacactagctttcacatttcaacatgcgatttgcagtagaaaaacatccaaattatatcaagagacccctcaccccttccaccatgtgagaacacagctaaaagttgccatctatgaaataggcgccaggtcttaaactccctagcctccagaactgtgagaaataaatttttgttgtttgtaagctccccaaccctactggactaaaacagtgcttttacgtgctattcatatttatgctctgggggaagccagggcacccggagggagatgtgctagtcctcccaggacagggccgctcagtggagcaggggttggcggcccttccactctcccctctcccctctccgtatcctggaaccaggaacagcagccaaaatcgttaaggcagcggttctccaaggctccctaggagaggggtcagtgtggaacaaaatctgatcctttctgttgttcttttggaaatgggctgttacggggtgggtggactacagggactcccatctgccccagtgagctccaccaagactccttaagaactgcgctttgagaaacttggaaactgtccaaagacaccaatttccctcatttcctccctccctctgctcttcgcctgcccccttgcctctcccagaccgtttcatcccagagccttcccaagtttccagaagccctttcttctttcttctgtttgtttggggagtggctctctcaggcttgttcacccaacagcccagtgagtccctgaagaggctggcacagccatctccccattttccctgcaggtttggaagagcagcctcgaagaccgaggaagaacatggactctggagtctgttactgccagttttggttctagtacgttaaactcctgagcctcagggtctacatctgcaaactgaggtgacaatgctggacttctctaagagatgacctggaggaccaaacttatctcctgccagtgtttctcagcgagggtgctggtggtgtctgaggcaggctgtgtcttcgttatgaaggagtatcccacatgttacggggtatttaacatccctggccccactcgctcacactcagcagtgccttcagtcactgggacatcctggataccccaggcatttctaagtaccccctgagccagcagtctcccaatcgagaaactaaactcctcgaaggcagggaccacgtctttgtgttgccaaagccaggtgcccagtaggggctcaatatgagtttgttcctgtcatggacttttttttttttttttttttgagacttgagtctcgctctttcgcccaggctggagtgcagtggcgtgatctcggctcactgcaacctccgcctccccagttcacgccattctcctgcctcagcctcccgagtaactgggactacaggcgcccgccaccgcgcccggctaattttttgtattttttagtagagacggggtttcaccatgttagccaggatggtctcgatctcctcacctcgtgatccgcccgcctcggcctcccaaagtgctgggattacaggcgtgagccacagcgctcagcctcctgtcatggacttttaagaacaatgatttttaaaaatccctgctgaggcaactgtgtgatcaggacacactcatgcacacaccgtacagcactcaaagtccttgccccggtggctcccaggctgcgactgcaaagagcagcagggcccagcagcagccaggggtgacagactgtaccaccttataagtcccggagctcagcgcagcaggcttggccaaccaagccctgcagtggggcaaggtgtcaggcaggatgtgtcagaacccagggtgaaccacagagccttcagggcagagtgacgtgacacttccagtcagaccagcctgactgtaggcgctaagggcctgctcttccccagccatccagccagtctgtgtgcccctggctcagctttacccaagaagaacacggactccttgagggctctcccagcttctgggaatgcccttaacacaggcactggtctcttgggcatggtgcggcacccctctgagcctgcttcccgatcttgtcaataggaatgccggtcagtaggaatcatcacactgcctctgaaatcatatagtatatgtggaaaatatactacatggatgccgcaattctgtgtattcctccttgcttctaaaccaagagacagcctgctgcatcggaaaaaccctgacttgaggagttcgagaccagcctggccaacttggtgaaaccccacctttactaaaaatacaaacaaattagccaggcgtggtggtgcacctgtagtcccagctactggggaggctgaggcatgagaatcacttgaacccaggaagcagcggttgcagtgagccgagatcgtgccgttgcactccagcctgggtgacagagcaagactccatctcgggaaaaaaaaaaaagaaaaaaagaaaatcctcagtcctggcttgggtattttactagccacaggatttggggtgaatttgaacacccatttagttgtcaaatcatcagaataacggtcgctgactttcctacttcgtaggagctgttgtcacaaccaaatgagctaataagcccagtggaaatatttgtgtagactccaaagccaacacaccctcccatcttccccaccccgcctctggcctgatggtcctggagaggagcaaggcttccaatcccttcctagtcagcccctctgtggggacagctccctgacttccagtgactctcttttggaattgcacatttattcattcacttattcagtaatctgatttccttcaacaagaggctttttctcttggctgcaaaatccattttttctttcctttcactgtgtcattctttctttcctttttttttttttttttttgagacagagtttcactcttgtcacccaggctagagtgcagtggcactatctcgggtcactgcaacctctgcctcctaggttcaagtgattctcctgcctcagcctcctgagtagctgggattacaggcacccgccaccactcctggctaattgttttatttttagtagagacggggtttctccatgttggccaggctggtctcgaactcctgacctcaggtgatccacccaccttggcctcccaaagtgctgattacaggattacagggattacaggtgtgagccactgcacctagcccactaggtaattcttgacatttttctctgttttgcatgttttctgtccctgagagtgggagactttgcctggccctctcttagggctcagcaagcattctgggcagggcagggacctgtgcaaatgtattgctctggccggaggccaaagggacggagaaaaactccttgctctccacaacaccttgctctccagcttattgtcttgctataagtgcaaataaaaatctaactggacattattgcattggctgttgttgttctggtagatgttccacttgcctgtgaaagcgggaaccctcattgggtgagaaacctcacagtaatatgacttatagtcatggaaatatatagggaaaatgtatacataataaagttatattgatatatgtgtatgtgtatatatagacagagatatagtcaattctcgttattcacagattccatattttcaaatttgcctacctgctagaatttatttacaaccctcgaatcgatgcttgcggcactttcacagtcattcgtggacatgtgaagagaggcaaaatatttgagtcacgcgccacagacattaccagctgagtttgaacaaggtgacaccatcttctcatctcagctttcatactgcaagcaagtgaccttttcacagtcaatttagtgacacgatttctgcatttttgtgccttttgctggtgacccccaagcctggtgctgaagtgctgtctagcattcctgagcacaggaagacactgacgttccttacaaagaaaaatgcatgagtgagatctgctccattcagtcatggggtatactgctgtagcccgtgagttcaatgctaatgaatcaacaatatatattgctataaggtgtctctaaacagaaacatgcagctgggcacagtggctcatgcctgtaatcccagcactttgggaggccgaggcagggggatcacttggggtcaggagttcaagaccagcctggccaacatgacaaaacctcatctctactaaaaatacaaaaattagccaggaacggtggtgtacacctgtagctccagctactcaggaggctgaagcatgagaattgtgcttgaaccctgggagaccaaggttgcagtgagccgagatggcgtcactgcactgcagcctgggtgacagagcgagattctgtctcaaacaacaacaacaacaaacaaaacaaaactggaaacatgcagaaaacaatgttatctgttgaccagttgatgaaaatgttgtgaccagaggcttgtgggacctaagcctgtatttccccctaggagcaatacttcagtatttgttaattcaatgtttgagatgactttatacaacatatagatccccttctatatttgaggaattccccccgctctgggtcttggagaggcaaggagctacccttcactctagagtcagggcaggccagggggagccgggccctgtcaatcagaccaagtcacactcagagctagtgccacacagaagggaggagtttgagagattatctgaagcatctctggtggtggagatggtgactccagcaccaggccattctctggggccagtgctagcagggttggaggtgcaagccggtgcaagctgtggtgctcatcgggtcctatacctgctctgagggggctgccaggcactgttgctgggtgcatagcctgaaacctggttccccagttctctagtcatccttgggtgacccaatatccttctaattaagtctttctgtgtctaaattagttagagttagttcctactgtttgcaaccaagaacctagtatatgtgtgtgtgcatgcatgtgtaggtatgtgtggatttagttgttatttttgtgtttatttctttacaagtaagtaactgggggttaagaagagttggtggaggaggcttcacagaggaggaggtcactgtgctggatcttgatggatggctgaaggtttgccagggaacaaagaggagtgttataggcagggtgggcagcgggtggaggaggcatggaggaatgatctacatggcacactcaggacattatgaggcattcagggaggctggggttgtgggaaggtgaagatggcagtggggcagctacaagtcaatggcagtggctgggaggcaggtaagaagctgaggctcccattctctccccattgttccctgagagttctgctccacgccctccctgctctcatctgcacccagcacaactgctttcaccagccccagatcacatgcagagtcaagccatatcaatccattcttgagagtggagaaagccaattcaccttccagcagtccagagagaagaggtgttttttataacaaattacagaagcaccatgtgaggacatcagaggtgagttcctccagagatgctgaatgagagtgtgacgaactcaaagccagactgtcttcatctgctctggctgccatatcaaaataccatggacggggtgcctcaaataacagatatttatttctcatagtcctggaggctggaagctgaagatcagagtgccagcagggtgagagctctcttcctggtttgcagatcactgccttcttactgtgtgctcacatggaatggggaaaagggagaaagagagggagagggagagggagaaagggggagggagagggagagggagaaagggggagggagagggagaaagggggagggagagggagaaatggggagggagggggagagggagaaatggggagggaggaggagagggagaaagggggagggagagggagaaatggggagggaagaggagagggagaaagggggagggagagggagagggagaaagggagagggagagaaagagagggagaaagggagaaagaaagagatccagcaagagatctttccctgttcttataaggctacagtcctaatggattagggccccacccttgcaagtttgtttaaccttaattccctcctaaagaccgtatttccaaatacagtcacattaagggttaggacttcaacacataatttcaggggacacaattcagtccatagcactgaccttcaaggagcttccttgagtgggatggagcatgagctggaaaccacagaccagagttctcacccagaccggcagcgtggcttggggcaagtcactggcattacctggaaaatgagaagcttcagtgaaacctcaaaattccttctgtcactaagattctttgaaagtcccagggctttttgcttgagctagggtagggagactcttcctcagtccacagcatccctgcaggaaaagtcgggtcaggaagagcttggctgttttcttttcagctcttgcatgaatatgcttggcacagggactgtgtgttcccgtggtaagagcttcttgtgatgctgggcccaggagatccacagcagggattccagtgtcctgtggggaggaggttgctgtcagaacagagggtaggaaagccaggtgatggggagtcagtggattctaactcagggagaggcccagaatgaacagattttctagcagcattggctgaaggtggaatctggggaaacaggcagggattttgcagttcgccaagccccaccgacttcactgctttctatttatgacttctgttctttgttacttgaccacaataagggatctttcctttcctgcaagagttggctctcataggctggaagtttatggaaactcatgctgggaggagggatgtgtggagaacagcatggtgtagaacctcacttctcagtgttgtcctgggccagtagcatcgcatcacctgggagcatgttagaaatgcagagtcccaggccccaccccagattcactgaatcagaatctgtattttaagcaagatcctcaggggttcctgtgcatattaaagttccagaagccctggcatggtacaaggaatgccagccttgatgccagcagacctgctcctaggaatggctttactactctactgtgtgactttgggcaagacaccatttacctctctgagacccaatttctgtaatacagagaggcaaaaataattgtctctaagggaaccattaccttgcactcagaagctttgcttgggatatatcggtgtgtcctgaggtgaggtctcacccggctttggaaacaattaccctgactgcattgctccagtcaccttgcaggaatttggggttttgtgagccactgacggggagaaaggcagccaacggtcttttggaaactgagagaggaaaggtgttcctgagaccactggtgtaatgagactgagaagtcaacatatctggtcaaaaacaaaaacaaaagcatatccagtcaaaaggaaacaggacctcatttttgtgtgtgtggagaggaggtgatggggctttccctgcagaccagactgaattcgcatctcatgtctcagggcagttagtttagtagaatgcttcttaaacttgagcatcatgcctagaatcacctgagggctggttttaatagagattgctggactccaccccagagtttctaacttagtaacttagtaggtgctagggactaaattgcactcccccagccccctgtcaaatttatatattgaagccttaactcccaaagtgactgtatttggagatagggcttttaagaggtaattaatgttaaatgagattacaagggtgcagtcctaatccaataggattggtggctttatagaaagaggaaggcctgggttcaagcagttttcctgcctcagcctccccgtagctgggaacacaggcatgccccaccatgaccagctaatttttttttttttttattttcagtaaagacaaagtttcgccatgttggccaggctgctctcaaactgctggcctcaagtgatccactcacttcggcctccccaggtgttgggattacagttgcgaaccaccgcgctgggccaagaatgtgcatttctaatctgggaccacacttttgaggattgttggcttagtgcttttggactgactgtctctgtcggggagtgaatttagttgatggacaggaaggcaaaggcaagtgtcagcatgtgtggttgggtcagtcttccccaaattgcttccttgagaaactcagaaataagtgaagaagggcacccaggtgagcgggtctcatcatggaggagcaggggtcaaggcaggagtggggccaggacagcaatccaggtatgggaactggggtgcccagagggctcagttccaggaacaaggcagatattgtggcacagggatctggccccaggctgacgggtgctgagatgcctgagccacaagaatgggccctgtaaatgccctgattgagctgagcccacagctgggaagcactgtggggccaggcagctcatggttccaagtctctgggaaccagggcaatgggtgaggtgggaacccagaaatgatgaagcccactcctgctcagcacagacctgggggatgtcacccttaggcttgatcagtcacagggataaaagccacaggttaattctccttcccaacaaagactttccgtttgctgtcctcctgatggtagaacctggtgaattccagtaagacctgagaaatggaattactctctgcaaaggcaggaaaacctgtgctatgccaagctgggggcagtgaggaggacatatttctgagtgtctggagctcagatggagctccccacagtgggcagctttctgaccctcagtccttttttgttcacagatagaagtgagcccacaaatctttgccagctaaagagcctttatagaccacctagttgactcctcattttaaaggtgtggttgatatgtttgggagggctgccctattctcaacaccttctctaggaattgtccctccattcctttagtttctgctgaaagggcagcagtaggcagccatctttgtaccatgtgactcactactctttccagaaatatctgattgaatgagaggtagtcatctgacctaagggcaggtgacctaatagccaatctatcccgagccaatgaccagtcagattcaatctctctctcaaaaaattgaattaatttaatttatttatttatatattttgagacagagtctcactctttcaccctgtctggagttcagtggcacgctccggaaaccttggactcattgtgtcacttccttcccctcatttacaacatcaaatcaatcatcacatcttgtcttcacttccttagtatctctcaggctctgcttctctccctacccctggcaaccccctaattatgtccccccatcacttacctggggcctacagtggcctctccacaccagctcctgagtctgtatgttccctaactccttctagagccaggatgatcttttcaacatacaagtatgatcttgtcactctcctgccactaggtgtacaacctcttgcctctgcctgtctctccacctcctctcatgcctctcaccactctgttccctgcactccagccacactggcctccttacaccttctccaatctggaatgttcttcctcccccacctactacctgaaaatggatcccttgcagggtatgagagtagagatggagagagaccttgaaccctgcaacgtatacctgcatcatgccctactcttgcaaattcccctttgtttccaaccagtgttaactgggttttcagtcattcaaaatgcaaagagccctaactgacttagtttgtctccttcactctgagctcctaaaattgaagcttgtgccttattaatttctacacggccaccgagaggaggcaccctgttttctctgatgggaggaaaaaggtgggagttgaatccaggctaggctgatcaggaatggaagtgggatgggaaatggacttattttgtgtcaaatcatatgctagatattttacaaatataacccatgaggttgacattatttatttctagatgaggaaactggagctgaagagtaacttgcccagggtcctgtttccagtaatggcagaggaacttctacaagatcacaaataacaactgtgaactctgggcaaagatttaagagaaaaaactgcctaaatgcactggaaagcaactgaaatcaggcaaacacgagaggagatctgcttaagagcaggttggggatgacagaaggaagagtcaatgaacttgaaaatatgtcaatagaaagtatccgatatgaagaacaaaaaggattgaataaaaagaaaagaggaagagcctcagggacttgtgaaaaaatatcaaaaggtctaacatatgtataattggagtctgagaaggaaaagagagaatgggacagaaaaaagtttaaaaaaatagtggctgaaatgtccccatgcttggtgaaagacatacatttacatacccaagaattttagtgtaccccagataagctcaaagctggataagtacaaagtacacacctaggcacaaaatcaaactactaaataccatacaaaaggagacaagttttaaaatagccacagaaaaaacaacatattttatacaagagaagaatgatataaatattgctgacttctcatgagaaaggaagtcagaaggcagtggaacatcttcaatgcattaaaagaaagaaaaaaacctatcaactcagaatcatatatccagtaaaaatatatttccataatgaaacattcatggctgggcgtggtggctcacacctgtaatcccagcactttgggaggccgacgtcggtggatcatgaggtcaggagatcgagaccatcttggctaacacggtgaaatcccgtctctactaaaaatacaaaaaaattagccaggtgtggtggcacgtgcctgtagtcccagttactcaggaggctgaggcagaagaatggtgtgaacccaggaggtggagcttgcagtgagctgagatcatgccactgcactccagccagggctacagagcaagactctgtctcaaataaaaaaaaaaagaaagaaagaaacattgattcagataaatgaatactagcagttttcatcatcattagacctgcatgaaagaaatgctaaaggaagttcttcagatagaagggaaatgataccaaaagaaacttagattacagcaaggaacaaaaagcatcagaaatggcaaatgtgggaaaatataaaagatggtttccctttaatttctttaaaatgcatgtggttgtttgaagcaaaaattataacagtatattgctgggtttatagtgcatgtagatgtgatatacatgacaattatatatcacataaaagatgagggggctttggttaaagagtctataaacttgcaaggtttcatattcaacaagaagtacaagtaacttgccaatgtcctttttttaatttttaatttttattatactttaagttctagggtacatgtgcacaacgtgcaggtttgttacatatgtatacatgtgccatgttggtgtgctgcacccattaactcgtcatttacattaggtatatctcctaatgctatcccttcccccttctcccacctcatgagaggccccaatgtgtgatgttccccaccctgtgtccaagtgttctcattgtttaattcccactcatgagtgagaacatgcagtgtttggttttctgtccttgtgatagtttgctcagaatgatggtttccagcttcatccatgttcctacaaaggacatgaacgcatccttttttatggctgcatagtattccatggtgtatatgtgccacactttcttaatccagtctatcattgatggacattcagattgtttccaagtctttgctattgtgagtagtgccacaataaacatacgtgtgcacgtgtctttatagcagcatgatttataatcctttgggtatatacccagtaatgggatggctgggtcaaacggtaatggtatttctagttctagatctttgaggaatccccacactgtcttccacaatggttgaactagtttacagtcccaccaacagtgtaaaagttcctatttctccacatcctctccagcacctgtttcctgactttttaatgattgccattctaactggtgtgagatggtatctcattgtggttttgatttgcatttctctgatggccagtgatgatgagcattttttcatgtgtctattggctgcataaatgtcttcttttgagaagtgtctgttcatatcctttgcccactttttgatggggttgtttgattttttcttgtaaatttgtttttgttctttgtagattctggatattagccctttgtcagatgggtagattggaaaaattttctcccattccattcattcctgttcactctgatggtagtttcttttgctgtgcagaagctctttagtttaattagatcccatgtgtcaattttggcttttgtggccattgcttttggtgttttagtcctgaagtccttgcccatgcctatgtcctgaatggtactgcctaggttttcttctagggtttttatggctttaggtctaacatttaagtctttaatccatcttgaattaatttttgtgtaaggtgtaaagaaggggatccagtttcagctttctacatgtggctagccagttttcccagcaccattgattaaatagggaatcctttccccatttcttgtttttgtcaggtttgtcaaagatcagatggttgtagatgtgtggtattatttctgggggctctgttctgttccactggtccatatctctgttttggtacaagtaccatgctgttttggttactgtagccttgtagtatagtttgaagtcatgtagcatgatgcctccagctttgttcttttggcttaggattgtcttggcaatgtgggctcttttttggttccatatgagcttcaaagtagttttttccaattctgtgaagaaagtcattggaagcttgatggggatggcattgaatctataaattaccttgggcagtatggccattttctcaatattgattcttcctatccttgaacatgtaatgttattccattttttgtgtgtcctcttttatttccttgagcagtggtttgttgttcttcttgaagaatccttcacattccttgtaagttggattcctaggtattttattctctttgaagcaattgtgaatgggagttcactcatgatttggctctctgtttgtctgttattggtgtataggaatgcttgtgatttttgcacattgattttgtatcctgagattttgctgaagttgcttatcagcttaaggagattttgggctgagactatggggttttctaaatatacaatcatgtcatctgcaaacaggggcaatttgacttcctcttttcctaattgaataccctttatttccttctcctgcctgattgccctggccagaacttccaaccctatgttgaataggagtggtgagagagggtatccctgtcatgtgccagttttcaaagggaatgcttccagtttttgcccattcagtatgatattggctgtgggtttgtcataaatagttcttattattttgagatacgtcccatcaatacctcgtttattgagagtttttagcctgaaggattgttgaattttgtcaaaggccttttctgcatctattgagataatcatgtggtttttgtctttgattctgtttatctgatggatcatgtttattgatttgtgtatgttgaaccagccttgcatcccagggatgaagccaacttgatcgtgatggataagctttttgatgtgctgctggattcagttcgccagtattttattcaggatttttgcatcgatgtttatcagggatattggtctaaaattctccttttttgttgtgtctctaccaggcttttgcatcaggatgatgctggcctcataaaataagttagggaggattccctctttttctatttattggaatagtttcagaaggaatggtaccagctcctctttgtacctctggtggaattcggctgtaaatctgtctggtcctggagtttttttggttggtaggcactaattattgcctcaatttcaaagcctgttattggtctattcagggattcaacttcttcctggtttagtcttgggagggtgtatgtgtcgaggaatttatccatttcttctagattttctagtttatttgcatagaggtgtttatagtattctctgatggcagtttgtatttctgtgggatcggtggtgataccccctttatcattttttattgcgtctatttgattcttctctcttcttctttattagtcttgctagcaatctatcaattttgttgatcttttcaaaaaaccaactcctgggttcattgattttttgaagggttttttgtgtctctatttccttcagttctgctctgatcttagttatttcttgccttctgctagcttttgaatgtgtttgctcttgcttttctagttcttttaattgtgatgttagggtgtcaattttagatctttcctgctttctcctgtgggcatttagtgctataaatttccctctacacactgctttgaatgtgtcccagagattctggtatgttgtgtctttgttctcattggtttcaaagaacatctttatttctgccttcatttcgttaggtacccagtagtcattcagaagcaggttgttcagtttccatgtagttgggcagttttgagtcagtttcttaatcctgagttctagtttgagtgcactgtggtctgagagacagtttgttataatttctgttgttttacatttgctgaggagtgctttacttccaactatgtggtcaattttggaataagtgtgatgtggtgctgagaagaatgtaattctgttgatttggggtggaaagttctgtagatgtctatttggtccacttggtgcagagctgagttcaattcctggatatcctttttaactttctgacttgttgatctgtctaatgttgacagtggggtgttaaagtctcccattatttttgtgtgggagtcctagtctctttgtaggtctctaaagacttgctttgtgaatctgggtgctcctgtattgggtgcatacctatttaggatagttagctcttcttgttgaattgatccctttaccattatctaatggccttctttgtctcttttgatctttgttggtttaaagtctgtttcatcagagactaggattgcaacccctgctttttttgtttgtttgttttccatttgcttggtaggtcttcctccatccccttattttgagcctatgtgtgtctctgcacatgggatgggtctcctaaatacagcacattgatgggtcttgaatctttatccaatttgccagtctgtgtcttttaattggagcatttagcccatttacatttaaagttaatattgttatgtgtgaatttgatcctgtcattatgatgttagctggttattttgctcattagttgatgcagtttcttcctagcatcgatggtctttacaatttggcatgtttttgcagtggctggtaccggttgttcctttccatgcttagtgcttccttcaggagctcttgtaaggcaggcctggtggtgacaaaatctctcagcatttgcttgtctgtaaaggattttatttctccttcatttatgaagcgtagtttggctggatatgaaattctgggttgaaaattcttttctttaagaatgttgaatattggccccactctcttctggcttgtagagtttctgccgagagatccactgttagtctgatggacttccctttgagggtatcccgacctttctctctggctgcccttaacattttttccttcatttcaactttggtgagactgacaattatgtgtcttggagttgcttttctcaaggagtgtctttgtggcattctctgtatttcctgaatttgaatgttggcctgccttgctaggttggggaagttctcctagataatatcctgaagagtgttttccaacttggttccattctccccgacactttcaggtacaccaatcagaggtagatttggtcttttcacatagtcccatatttcttggaggttttgttcatttcttcttactcttttttctctaaacttctcttctcgcttcatttcattcatttgatcttcaatcactgataccctttcttccacttgatcgaattggctactgaagcttgtgcatgtgtcacgtggttcttgtgccatggttttcagctccatcaggtcatttaaggtcttctctatactgtttattctagttagccattcgtctaatcttttttcaaggtttttagcttctttgcaggtttgaacatcctcctttagcttggagaagtttgttattaccaatcgcctgaagccttcttctctcaacttgtcaaagtcattctccatccagccttgttccattgctgctgaggagctgcattcctttggaggagaagaggtgctctgatttttagaattttcagctttgctgctctggtttctcctcatctttgtggttttatgtacctttggtctttgatggtgacgtacagatggggctttggtgtggatgtcctttctgtttgttagttttccttctaacagtcaggaccctcagctgcaggcctgttggaatttgctggaggtccactgcagaccctgtttgcctaggtaccaccagtggaggctgcagaacagcaaatattgcagaccggcaaatgttgctgccttatccttccttgggaagcttcatctcagaggggcacctggctgtatgaggtgtcagtcggcccttactgggaggtgtctcccagttaggctactcaggggtcaggagcccccttgaggaggcagtctgtctgttctcagatctcaaactccgtgctgggagaaccactactatcttcaaagctgtcagacagggatgtttaagtctgcagaagtttctgctgccttttgttcagctatgccctgcccccagaggtggagtctacagaggcagggaggctccttgagctgtggtgggctccacccagttcaagcttcctggccactttgtttacctactcaagcctcagcaatggtgggcgcccctcccccagcctcgctgccaccttgcagttggatctcagactgctgtgctagcagtgagtgaggctccatgggtgtgggaccctccaagccatgctcgggatataatctcctggtgtgccgtttgctaagaccattgaaaaagcacagtattagggtgagagtgtcctgattttccaggtgccatctgtcacagcttcccttggctaggaacgggaattccctgaccccttgcacttccctggtgaggtgatgccacgccctgctccatggcctgcacccactgtctgaagccccagtgagatgaacccagtacctcagttggaaatgcagaaatcacccgtcttctgcatcgctcaccctgggagctgtagactggagctgttcctattcagccatcttgggacctctgatcactgccaatatcctttatagtcaggaagtggtagaacaaagtgtgactaatgtccaaatcccatcattctctttctgctacaagagaaaagaaaagtgaaagggtagaaggagaagtcgagacagggaagagactcgggcagcttcaaatggcttcaggggcccaaaagctgctgaacacagaggattcccaggcttcggagtctgacctaatgaatgacagggcatagggatgaggcagcaggaggggccaaagtgaagactcaccttcccaataagccttgcagtcagaccttgtgtctgagcagatgtgcctggaaaagtgacctccagatgggttaggaaggtccctattgccacagtgaatcctgcccttgccccctggccagggagcagctaatcctccatgccagctatccaggctccctggagtctttgataaagacctggacaaggcagattgcaattctcatgggagggagctggggtggggcaaacgtgttcctccagcactcccaaagccagcctcagccaggcgtggcagctcatgcctgtaatcccaacactttgggaggccaagtcaggaagattgcttgagcccaggagttccagaccagcctgggcaacatggtgaaacaccattgctataaaaaatacaaaaaatagctgggcatgggtggtgtactcccgtagtcccagcaacacaggagactgaagcaggagaatcaattgagcccttgaagtcaaggctgcaatgaacagtgattgcaccactgcactccagcctggacaacagagggagaccctgtcaaaaaaaaaaaaaaaaaaagcctgcctcgtggcttcagttcctgcaatgtatctgatgtacctggggccaaaagcctggactctgggccagctctgtgtcccgcactacagttgaggaaagagatcagagaaagggacaaaggatagatttgggtcttgattcggaataacccaattctttgcccacaggagtagaaaagatggaagatgtgcccactatttccctagggtccctcagctctgagtcccccttctacactggctcagtgatgccgggctgggctgcacctctgcaactacagtgcccagacccctttgccagctggctttctatttggtgctatctctccataggaagtcccggagaaggatcggaaggcaggagaggggagaaggtgcttttcccttcccgtttgtttgctgttcctgtcagtgcagcccagcagtggcagctggtccagtctccagcgtccttcagcatcccggtgccagccctcctctgcctgctcagaaagaagaaccctcggagctggccagcactgctcttagtgcccaagctccacccttccaagctcctagtttcctgttttcttccctttcatccccccagccttaaaggtgatggctgctttctatagttattttctctgggttttcctcagtattctgttttttctcttcctgccaggtgtaaccaaatcctcatattaaatttcccctgttgagatcctggcatgatttctcttttcctgactggcttctgctgattcagaaagaaacagagctgcttctccagggagcctgctgtgttttacaagacacagagtgggactgagggcaggggaggggctttgggctaaggtggtcctgagtccaaatcccttctctgattttaccccctgagtgactttgggcaagctacttgatttctctgcacttcagtttcctcacctgaaaatcgggttagtaacacaaacctgattcgtcttcagtaccagagacaaaaaaccaatttgaactaattaggcaaaaggatgaaattattctggaaagtttccagaaaagtaatcatcaagtgcaaagggcaagaaggcaggggtctggctcacctctcctagaactggaatcaggaactcaagtgcattgaggatctctctgcccctcagagctgcttcccagtttgtggtcccgattcttatcacagagcatcttctccatgtggtggaggaagatgtcttctctcagtttccagactcttgccttcacagctttgcccacagaagaaaccactcctcctggtgaggcccaactcagtagtgtccaaggaaaggcacaattggccagggaggttatgagttcatccctgcacacacactgttacctgggagcagggtcacataagggatgacagctgctggtcagcgacaacacgtctagatcttgcaaaaacccgggcattgccacatgactcttcccgtttcacagatgagcaagctgaggttcagaggaggaggggcttgaccacagtcatgcggctttcatctaaataacaataccggacattatgtcattaaaaatcaggttacggccgggtggctcatgcctgtaatcccagcactttgggaggctaaggcaggagaatcacttgaacccaggaggcagaggtagcagtgagctgagatcacgccactgcactccatcctggcaacagagcgagactccgtctcaaaaaacaaaacaaaacaaaagaaaaaaacaggttattagctgggcacgctggcacacacctgtaatcccagcactttgagaggctgagaagggagggtcacttggggccaggagttcaagtccaacatggacaacaaaacgagaacccatctctaccaaaaagagaacaaaattttttcgagacagggcctcactctgtcgcccaggctggagtgcagtggcacgacctcagttcactgccccttacacctctcggattcaaggattcttgtgccccaacctcctgagtaggtgggattacaggcacacactgccatgtctggctaatttttgtattttttggaagagacagggtttcgccacgttggccaggctggtctcaaactcatggcctcagatgatccacccgctttggcctcccaagtgctgggattacaggcatgagaaatactctttttaattagctgggtgaggtggtgcacgcctgtagtggtagcttttggagaggcaaggcaggaggatcacttgagtttaggagtttaaggctgcagtgagccgtgatcacaccactgcacctcagcctgggtggcagggtgagaccttatctcaaaacaaaaaacccgagataactggcagctctgcaggcttagaggaaagcaactggatgtgggtgagtgtagtgcagtaggcaaggagggaagaaggctgcatttgcttcatgcctacaatgtgccaggcactggcggatcgacacaggagagccatgcctccagtgtctatcctgttttgaaaagagaagaaaatgaggttcagaatggttccatacccaattccaggctccacagcttagaggcagggctggaattcaaaccctagtcttgcgggttctgtgcattactcatcgcagtagctgtatgcctaggcccctcgggaagtttctggctattggacagactcagattggatgacattccctggctccatttcctctggttttagatgccagcagaatacaggtccctctgggcatcgtggcattcgaaaaaatgcagggaaagggtccacagaaactaaaaatgatgatcaaggggcagaaagggttttctgaggaaacgtaaagacaaactgggctgttgcattgctggtgacctgcctctggcacttctccagctgtatctctgcctgaccctccagccacactaaattttttacagcttcccgaatatgtcactgttttctgcctccacgcctttgtagaaattgctttctttacctaaaacacctttcctactcccatccaaaccctgccttcctgacaaactcctatacatccctcaaaaccgatttcggtcatctcctctgtgaagtcctgtttcctagcagtggacccttcctgcttcataccctagggttgattgcttctttttctttgtcctcagcacacctaagacttcctccaaactggtgattctccactcccatgtgcagatctgcttgctgcatcagaatcacctcaggagtgatttcaagatagtcaagcccaggccctgctctgggagaatctgactcagactctggagtgtagccagatgtcagaaataagtagattgtccaagtgcttgtgatgctcagccaggtgtggagagcactgaggtgcacccctggaaggcaggaccttctccataccagggcttggctcagaggagtgcacagtgagtggggaaggaaagaagggagtgtgtccagcattggttccttcccgtgggttcttggtctcgctgacttcaagaatgaacttgtggacactcatggtgtgtgttacatttcttaaaaatggtgtgtctggagtttgttccttcagatgttcaaacatgtccagagtttcttccttctggtgggttcatggtctcgctgacttcaggagtgaagccacagactttcgcagtgagtgttacagctcttaaaggtggcacgtctggagttgtttgttcctcttggtgggttcgtgatttcactggcttcagaagtgatcctacagacctttgtggtgagtgttacagctcacaaaggtagtgcggacccaaagagtgagcagcaacaagaattattgcagctagccaaagaataaagcttccacaacttggaaggtgaccagaggggtggccagcttttattcccttatttggcctcacccacatcctgctgattggtccattttacagagcgctgattggtctattttacagagtgctgattggtctgtttttacagagtgctgattggtgcgtttacaaacctttagctagacactgagcactgatttgtgcatttttacagggtgctgattggtgcatttacaaacctttagctagacacagagcactgattggtgagtttttacagagtgctgattggtgcgtttacaaacctttagctagacacagagtgctgattggtgtgtttacaatcctatagatagacagaaaagttcttggagtccctacctgacccagaagcccagccggcttcacctctcaggagggagggagggagggagagagggagaaaaagagagagggagggaggaagatagggagggagggaaaaaggaaaggagggaggaaggaaggaaaggtgggagggaggggaggataggaaagagagagaacgaaaaaatagaatgaaagaaaaatggggctgggtacggtgtctcaggcttgtaatcccagcactttgggaggccaaggtgggcagatcacctgaggtcaggagtttgagaccagcctggccaacatggtgaaacccagtctctactaaaaataaaaaaaactaactagccggatatggtggtggacacctgtaatcccagctactgggaaggctgaggcagagagaatcacttgaacctgggaggcgagattgcagtgagctgagatggcaccactgtactccagcctgggtgacagagtgagactctgtcaaaaaaaaaaaaaaaaagaaaagaaaaaagaaagaagaaaaagaaaaatgggaggaaggagggaggagggaggagtggggaggaaggaagagagaaaggtgagtagagacaggtgggaggatgaaaatgagcatgatccaggtatgagcagaaaggggcaggaagctggggtctcgggtgtgatgcctctaggccattctacctcacctcttgttggcaaagatgccacttctaaagttagacatacaggggtttgagtcctggttctgccactcaccagctgtgtgtgccttggcaagtcacttgacctctgttttctctgcttacaggtgataactgctgtgcctgcctcaccacaatgttctcaggatttagcaagctcttatgatcagcacctttcaagcattcgtatgcacgagaagcagcgggggatttgtgaaaatctaggttctgactcgtttatgttgggctggagcctgggattctgcagtggactccaagtggagtctatgctgctggtctgtggaccaactttgagtagtgaggatacagataaaaagtcagacacctttcctctcagggaacttacctgattctctgcaacaggttgggaacgaggccaggagtgcccctttacagagcatgttgtgtgtgccaaacctggtgctcagccctaccacgcccccctcactgagctgggaggcccccgttttctcagaacttgagcaataatgatcatgccttgttcaaatcacactgagtttcctatttcaactgtaacaagttttcgtaaactaggtggcttagaaagcacatttattctcttatggttctggaggctggaagtatgaaatgagccttaggggctcaaatcaaggtgtctgtagggctgattccctctggaggctctggggggaatccgctccctgactctcctagcggctgctggtattccttggcttgtggccgcatgacttgaatctctgcttctgttgtcacattgcctcattctcctctctctgacctcctggctccttcttataaggacccttgtgattacatcgagtctatctccccatgtcaagagccttaactttcttatatgcaaagtccattttaccatgtcaggcaatacagtcaccggttctggggattagggagtggatttctttggaggccattgttctgccaaccacaactgtccaggcctctcatcagaacctcccaggccagaccctgaccacagagcttaggatgcacatcctctccctggaggaaatctgtcatgatccctttgcagtccaggctctgagctgaagcggtggccgtgagagggactcattccttagcgtggatgctccctctccatgcattgatctcccaagagtcagaagctgaaggagcagggccaaggtcatgctgtccctggagccccggagcacatgcttgccataaggcacactgctcataagagccaggccagaggtgacctctccggcagcaaatccatcaggagaaaattgataggaaggccagccagaagatggacagagcattgttaaggaggcaggagtggttggacattgacaaggaaaaggaagttgaaaaaatccagcttgcttttttcctaaaacagttattcccttaaccccatggtccctgagacagtggacgagctgggctgactggcttaggggtcacatattctgagcctattaatggcttttggaggcaagctgggtgacaggtacccattcctgcccagtgtctgggtcaaaggatggacccacgaggcaaacggatccaccccttggcttgcccaccatagctatcggtgcaaagacagtgctttggacttggaggtagggtggccaatcgtcccaaatttcctgggaatttgatgagaaaactgggacacattagtcaccttacatgtaggaagctgtaaaaacccagcagtgggcttggttgctgcctaccctccagccccaggcaacttggcaggcctcctaacaccttcagctggcagggcccatcactgttacaaaagattctccaagtgaagcaatgccagtggtgacagctggagcttaggggctgctggagaggacagccctctccattggggctgctgagtcacactggttcaaggtctgggtgattctagagcctgatttctctcaagtcactagggatgggcagagggggggctcaggctggaaggagaaaagggaggaattaaatcccaaagttaagattccactgcaaaagctgaatgcccattcagaagcctgcaatgagagcatggcttttcagcgtcaaaggtacccgtgctgggggccctggacctgctgctaggaggaagtgtgctgtggtgggaaagagaatgctggggccggacagatcctggatttcctgcttcccagcagaatgaccttgagcaagccccctagtgtctctgagtttttctcactggaaaaaaagaggctaatgacacctctgtgcagagttaaggcaataaacaaccaatgtgtgaacttgcctaatacccagtaggtcgctcctgtcttcaggaccagaccaaggtcaataggaaaacaatttaataaccagaggctgcctggtgagccttgaattagagtaaagggagttggataaacccagggctgtttatccaagccctggacccagggcccttccctccctctctctccctctctctctttctctctgctgctccttcttcagttatttcttttatttttaatttttttgagaaaaagtcttactctgtcacccacactggagtgcaatggtacaatcaaggctcactgtagcctcagtctcctgggctcaagcgattctcccacctcagcctcccaagtagtggggactacaggtacacaccaccatgccaggctgatttatatatttttggtagagatggggttttgccatattgcccaagctggtctcaaactcctgagctcaagtgatccttctacctcggcctcctaaagtgctgggattacaggcgtgagccactgcacccggctcttcttcagtatttcttacgagtcccctggccctcccatccttccagcagtccttcgtgttgcctgtgttgcggatggtttgatctagctccattatatgacacacagacactctgctaggcttttttaatttttttaacataagtgatttaatttgaccgtccagcaacccgttgggggtaagtattgctctccccattttacagatgtggaaactgaggtttggagaggttgaggaaatattacttagggtcataccaattcagggtcacacctccaggtttcaaattcaatgctttctccctgtgaggcagaccccacaacaggggtcatgttagtagggtgtctcctgcagaggatttaggggggcagcccaccctagctgaactgccacgttcacacagcatcaggaaggcaccatcatcctttgggccacttcctgattacaggactggtagaaggttcttttctaaagaatatgggctccttctcagtccccaatcagctgctgacagggaatgtcccagttctcccatctgacttaccacccctgatccctcacctcagacggtgtgggccaaccttccaccgctagaaatggaagtgacaaccgcaacttccttttgtgagacaaaagggaatttattacattgggtagaaaaggatatactcaagtaggagtacgacacgtagagagtcagggaaaagtccccagtcttgcggcttcagcctgacgtgtctagagtcatttctgttttactgactaaactcttactgttacacaagtttgaacacactcacatgctatctatctacacacacacacacacacacacacacacactcacacggaattaataaacatgcattaaataaaacaatagcatctacaccaggagggagttagtggagtcaaactgatttaagaatctttcattgttttggtggaagttgaaggttttgatcaacttttggctttggtagattgataatgcatgttgctgggtgcggtgagacacctgtagtcccagctactcaggaggaggatgaggtggaaggatcacctgagtcgaggagtttgagaccctgtctctcaaaataaaaaagaatgcgtgctgcaccttctgaggtaatcactaaaagaatgggaaaagatgtttttacaaattaaaattaattttttttctagagtcagttactcccaagaaaagggcaagaaaggagacaaaaagcaatatggggcaggcaggacaaatagaaaacaaaataagatggtaaatgtaaacccaaagatacatagtatattgattatataattattctattaaagggtaaagattatcaacatgattttaaaataaaaattcaactatgcgctttttacaaaagatacattaaaaacacataaagtgtaaatgcagaaggatagaaaaatataaaccatgcaaatcctaaccaaaagaaaacctctgtatagtatgttaattattgtaaatatccatgttattaatagctgacaaagtagatattaagttaaaagaagttacaaaggctgggcgtggtggctcatgcctgtaatcccagcactatgagaggctgaggcaggcggatcacaaggtcaggagatggagaccatcctggctaacacggtgaaatcccgtctctactaaaaatacaaaaaaattagccaggtgtggtggtgggagcctgtagtcccagctactcgggaggctaaggcaggagaatgatgtgaacccaggaggcagagcttgcagtgagccaagatcacaccactgcactccagcctgggcaacagagtgagactctgtcttaaaaaaaaaaaaaaaaaaaaaggtacaaaagaaaagaggatcacttcgtaatggtaaaagggtcaattcacctagaaaacataacaattataagtcatgtgcaaaagaattggaaaggaaaactaaaactgtcattatttgcaggtgatataaacttcatatatagaaaatccaaaaggatctataggtgaattattagaattaataagaaagcttgacaatattggtagatacaaatttaatacaaataaaatcattcacatttttgtatatcagcaaccagaagtaaaaaaaaatgttttttaaaaaaattatttacaggatcatcaaggatagtatattactaggaataaaactaacaaaaggtgtgcaatctgtttgtggtataattataaatatgtactgagagacattttaaaaagacttcaaaaaagcaggaacataccttccaccacatacaaaagttaactcaaaatagatcccaaacctaaatgtaaatactgaaactatacgaagaaaacatagtagaatgcctttgtgactagggttaagcaaagatttctctctttttttttttcttttttttttttgagacagtctcactctattgcccaggctggagtacagtggcgccatctcggctcactgcaacctctgcctcccaggttcaagtgattctcctgcctcagcctcctgtggccggctaatttttgtattttttgtagagacggggtttcgccatgttgcccaggctggtctcaaactcctgacctcaggtgatcccgcccgcatcggcctcccaaagtgctgggattacaggcgtgaaccaccgcaaccggccacaaagatttcttaaatataacaagaaaagcacaatctgtaaatgaacaatttcataaaatgaacctcatcaaaattaaagctcttgctcttcagaaggcacacaagagaataaaaggacaatcccacactgggggaagaaaatctttgcaaagcaaatatctaaaaaatgagttatatccagaatataaataattctcagaactcaataataagaaaaccacccagttacaaataagcaaaagatttgaaaagacacttcaccaaagaagatatatacacataagttcacactttgggaggccaaggtgggtggataacgagatcaagagatcaataccatgctgaccaacatggtgaaaccccgtctctactaaaaaaaaatacaaatattagcaatcgtgaaactctgtctcaagaaaaaagaaaaaaaggaaaaaagttcaacatcattatgaaggtgagggtggggtgtgttggggaggagggattatactggggcaggaagaaatcttagccactgatggatatgttcattatcttgatggtaatgttggtttcatgggtgtatacatatgtcaaaacttattgaattgtacactttaaatatgtgcaatttattgtaagtcaagcaaaccccattgaagctattttttaaaggacttcaataaaagcagaaatatactttgtgggctggcaaactcaacagtcttcccaatctgatttataaattcaatacaattgaattaaaatctctgctacttaccttttattttgtggaacttgatgcgctcattctaaactttatatgaaaatgcagaggaacaagaatagttcagagacccttgaaatttccctcacaaggtagaagaatttgattcaccaaatataaagattattataaatctgtagtaatcaagacaatgtagtgttggctcagggatggaacaatagaccaatggaactgaaaagagagtccagaaataggttcctgctaatatgggcacagtgaatgatagagatggattgcagagagggagaaaaggggggactttgcaataaataaatgggtctcgagtagctgagtattcatattgtggggagggggtgaaaattgtacccttatctcacaccatacacaaaaatcaattccagatggaataagaaccatgatatatgtcagaggcatattttttatcttatctttttttttcttttttgagataggatctcattctgttgctcaggctggagtgcagtggtgtgatcatagttcactgcagcctcaaattcttgggctcaaatgactctcccacctcagcctcctgagtagctggcattacaggtgcctgccaccatgcctggataatttttgtacttttagtagagaagaggtttcatcatgttagccagggtggttttgaactcttgatctgcttgccttggcctcccaaaatgttgggattacaggcatgagccaccatggctggcagagaagaaattcttaaacacattcacaaaaagtacaaatcataaaggaacacattaataaactctactacattaaaattaaaaacttctgctcttaaaagagggaaaaaaacaattcacagagtgagggaagatatttgcaactcaaagaattgacaaaaaagtagcaacaagactatataaatacaacccaacagcaaagacccagtagcgcacacctgtaatcctagcacttcggaagactgaggcaaagcaaatcacttgagcccagaaggtccaggacagcctgggcaacatggcaaaaccttgtctctacaaaaaatataaaaattagccaggctggtggtgcacgcctgtggtcccaactacctgggaagctgaagtgggaggatcacctgaacccaggagattgaggctgcagtgagctgcgatcatgccactgcactccagcctgggcagcagagtgagaccccatctcaaaaaaaaaattggcaaaattctttctaggcactttataaaagaagaaacccaaatggctaataaacacataaaaatgtgctcaatctcatttataatcaggaaaatgtaaattgaaaccacaaagagatattactacatacatgccataaggacagtcaaattctgacactaccgagtgcttagtgaggatgtgtagctgcaggaactcttatacactgcttataagaacaataaattggtgcaaccactttgattaacagttcagcaccttctggtaaagttgaataagtagaagcatacttagacgaactcatgcagtgtatctgcaccaaaagtgatgaacaatgaatgtctagcagctttcttgttaagccagaatactagaaatagcccagatctccaaaaatagtaaatcagataaatgaattgtagcatattcataaatggaatgccatatagccatggaaatcgacaaactatagctatatgcaacaacataaatgaagcttacaaatataattttgaacaaacaatacaaaagaatacatttagaataattcaatttcttttatatatatatgtcaaaatatgcaaaatgaatgtatcttgtttagaggtgaatacataggagagatgataagcaaatgaaaagcaagaaaaatattatcttgaaagtcaggatagtagttatttctgggaagagggagggggttgtcaatggaaaaggtacataagggggcgtcttggagtgctggtaatattctaggtgttcaagaccaaagagcctcttacccctggccaatgactgtggttaggggaactccttaagctgattgacttaaatctagagtgctgaaccaatccctggcaagagaagtgagattatttaaatttagatcaacccaggtccatccctaaaactgtggtggaatgggctgcccctgaggcacacagaccacttgggaaaagagtggatatctgaataaaatcatagttcttttaagaagaaggaggaaataaatgctgagaaggtacccacccacatcaactgtaaccctaattcagctgctgtgattaaatattcacagttaccattcccggcactacccacactggaccccagaacccttttataccaccccaccacaaggcatgggggtctttgtgttactccctcaggattatagggtccaggtaagagcctggacacagttgagtccaggtcattggcactccccatgtgtcaggaaggagaggagaggaacatctttccttatttagttctcttattcaaagagggttctgcttcccatctgttctgggattcccctgaaataggagaggcattcgaatgccaggtagtcagtgggggttggggaagaaggaagaacaccctttgattgacaaaccctgtccagatccattcctcccttcgccccgccaacagccttgtatggtagatatgggtgtcactatttccattggcagacaaggaaactgagtcaatgtaaataccttgaccaagttcatacagctaataaatggcaaaactcaaacttacatccaccgctttgactctgaagctgattctctgcccacagcctcaggctgcctcctattaaagagcttcagattattaataatgggagcaggtttgattgggagagcaagtggtttctcaggaaatgtctcagagatgggaggctgggtcacattctacccaggaccttcctggaaacttcagtcctcaggaggctggtcctgccgagttaatggttggctattttggtctgcacttggctaatctgcaagtccaacccacccataaccaccatcctcacccccacccataactcagtatccagataaagactggaagggaggatattccagagactggatatggactccctagggtgatcggaatcaaagaatctttctccaaaccaacccattaccctacacagaaattctctagcaccatgaacccatgactgagcaccgctgggggcaggcaccacctcctctgccagctgcccatttgaatgtcaggtggcctccttgttagaacccctgacttccatcaagtcaaaagctccctccatgtaatgtccacatcctggtccagttctggccttgtgcagggggtaagtgtccccaagacattccttcagagagaagagggaaaaagaggattgggatgaagagatacaggggtaaggacaaggcagagaaaaaagattttcttcttcaaggtaaaattctgagtcctgaaagctgctccccagaccagaattaaacttaacacttaggccctgagctctagtggatcgtgcatatcacaaacccacaaaaataaataaattgattaacaagtactggattgcctgtaactcgggatcctgcctcagccctggcacagcacagccccagccctaaacagctgctctcatgactaacaccgtccagaccccaggaactgcttcaacgctgttactgtccaaagctttacctttagataccacgaaggtttgtgggttttgccaatgccaaggttggacactgagcagagaggatgcaagcagcagaaacacttgagtgaaagaaagaaaagacacatgaaataacttgcaaaatctttcctgtcacatagcaggaatgggccagatccttgcattcaatggatcacattttccaggggcgttgagttgttttctcgcttctttgatgttcctattagttgttctagagctattaataaattaatacggcattctcaagacttgcacaagagtggttgagggacgctttgcaatcttaaataattcatattagtcttagatttgtatatatctaggtttggacataatatacatcagtggtccccaacctttttggcaccaggggctgatttcgtgggagataatttttccatggacagggtgtgggaaatggtttccagatgaaactgttccacctcagatcatcagacattaggttctcataaggagcacacaacctagatcccttggccaggcacggtggctcatgcctgtaatcccagcgctttgggaggccaaggcaggtggatcacttgaggtcaggagtttgagaccagcctggccagctggtgaaacccagtctctacaaaaaatacaaaaattaaccaggcatggtggcgagcacctataatcccggctactcaggaggctgaggcaggaaaattgcttgaacctgggtggcggagattgcagtgagccaagactgtgccattgcactccagcctgggcaacaagagcgaaactccgtctcaaaaaaaaaaaaaaaaggagcacacaacccagatccctcacatgcacagttcacaatagggggtttgagctcctgtgagaatccagtgccaccactgatctgacaggagatggagtcatgcactaatgtgagcaatggggagtggctgcaaatacagacgaagcgtcactcactcttctgccactcacctcctgctgtgccaccccattcctaacaggtcatggcctgggggctggggaccccgatatacatgaagcatgatactaattctttacattgtcagaccttgaattgcagaattgcaatagctttttaataaaaatatttaataagatttaattaaattatcaaaaaataaaaatgattttattaaataactttattagtttcatattaatgataatttatattttacctttaattttaatagataatttggaacaggggtcaaccaactttttctcacagggaaagacaataaacattttttacttttcaggacatgtgatctctgttacaactactcaaatctggtgttgtagcaaaaaagcgctgtagacagtatgtaaaggaatagatgtggctgtgttccataaatgcttgtttacaaaaacaggcccacaaccatggaccttattttgttgatccttgatttagaagataagaacttttttaaaaaacaaaatcatttttaattttttacactcacctcaatttgatgaaaatactttttttttttttttttttgagacaggatctcactctgtcacccaggctggagtgcagtggcatgatctcggctcactgcaacctccacctcctgggttcaagtgattttcatgcctcagcctcctgagtagctgggattacaggtgcgcactaccacgcctggctcatttttttttttttttttgtatttttagtagagactggtttccccctgttggccaggctagtctcaaactcctgacctcaaatgatccacctgcctcggcctcccaaagtgctgggattacaggtgtgaaccaccacatccggcctgatgaaaatactttaaaaaatttattttattcatgcaagtttatgggttacatgagaaaatttgttacatgtacctgaaaatacatttgaatacatttttttaagctcattactacttagggaggtcaaggtgggaggatcacttgaaaccaggagtttgagaccagactgggcaacaaagaaagactccatttctataaaattttctttaaaaattagccaggtatggtggcatgtgccacccagcaactcaggaagctgtggtggaaggaatttgaggctgagccaaggaatttgaggctgcagtgagctatgatcataccactgcactccagcttaggcaacacagtgagatcctatctctaaaaataataataataatgataaagcggattactgctatcaatagaacagaaattatgcaaaaatattaatcataaccataattagtgatttttctaaaaataaggcaggaagggccaggtgtggtggcccatgcctataatcccagcactttgggaggctgaggtgggcagatggcttgagtccaggagttcgagaccagagtgggtaacatgatgaaaccctgtctctacaaaaaatacaaaatttggctgggcatggtggcgcacgcctgtatttccagctacttgggaggcagaggtgggaggactgcttgagctgagggggtgagggttgcagtgagctgtgatcatgccactgtactccaacctgggtcacagagcaagactgtgtctctaaataaagaaggcaagaaaacaaattgtatgaagaagaaaaataattagtgatttatgtatgcttttgttttattgctcatcccaatattactggcccatcaacagagtttatttatttatttatttatttttgagatggagtctctctgttgcccaggttggagtgcagtggcgcaatctcagctgaatgcaacctctgcctcccgggttcaagtgattctggtgcctcagtctcccgagtagctgggattacaagcacgcgccatcatgcccagctaatttttgcattttttagtagagacagttttcaccatgttggccatgctggtctcgaactcctgacctcaggtgatctgcctgccttggcctcccaaagtgctgggattacaggtgtgaaccactgcacccagccaacagagtatatttagtcatctaaaatagtctttacagttaacattttttatataagtagagagaatacactctaaaataatgataagtagcataataaatacataaactagtaacatagtagtttattatcattatcgagtatcaggtactgtacctaatttttttttttttgagacagtgtctcactctgcactctgtcactttgtcatctaggctgtagtgcagtggtaggatcatggctcactgcagctacttcccaagtagctggacttaggaagcatggtagcatgccaccatgccagtctagtttttattttttgtagacacagggtttcaccacattgcccaggctggtattaaactcctggccttaagtgatccacccgccttggcctcccagagtgctttgattacaggcgtgagccaccatgcccagcctgtacatgttatactcatatgactggcagtggagtaggtttgtttataccagcatcaccacaaacatttgagtaatgcattgcactgtgacattatgatggctacaacatcactaggcaataggaattttccagctccattgtaattgcaatggggccaccatggtatatgtggtctattgttgattatgatgtcattatgtggtgcacaactatagtaccttccatgtaaggttgctatgaggattcagtgagattgaaatactgtaaggaaggaacttacacttcccgtcacagatgcaaaatgtcagctgatgccatggataaagatgttactaaatatgttgcccagcattaaaaaggaataaggatgcaaattgcagaacaatgtgtacagtattctactttttttattttttttgagacggggtttcattcttgttgcccaggctaaagtacaatggcatgatctcggctcagtgcaaactccacctcccgggttcaagcaattatcctgcctcagccccccgagtagctgggatgacaggcatgcgccaccacgcctggctaattttgtatttttagtagagatggggtttctccatgttgatcaggctggtctcaaactcccgacctcaggtgatccgccctcctcggcctcctaaagtgctgggattacaggtgtgagccactgtgcccagcctattctgcctttactgtaaggagaatatattttttaaatcatatatttatagtttcttattaagcttaaaatcatgacagagaatattctggaaactaatgccaatattgacagaggagattaggtgggggtgggggagtgggatggagtgtatgaagaggttttttgctgtttccctgtttatgtattttatttttgcatttgaaccatgtgaatgcaattcttatttataaaatcaaatcaaacctttaatttaatattacaaatgtgttgtaaagagctgaatgcaacactgtggctaaaccaggtagagcagttctctcccctcccttgacctagaggctccctatctgctcagaccacgttagcctcccagaccacgttagcatgttttcacctctgcaccacacacctcatcccacccggcttccagtcagcaaactcactgaggtagttggcctggcccttggctgcagtcgcctgccctggcagggcctggctgtcattgggggacagtgtagtgaacatctctccctccatctcttcctcccaggaaggctgcccacagcccaagcacagggctcacactctgtctggctttgggacatacctcccaccctggcagggggtcgcttgtttggacttcatgataccactgcgggcccatgattccaactctgctactttggagctgccttcccagctcaggttaggtgctgccctcctgcctgtggctccttcctgtcctggaccctacacttggacccccagccgccgcctggcccctgcttaggccttagtccttgcttgcttggaaattctgtgctggcccccagcctgtgctctgagcatgccctcccagccccctcgggcctctctgggccatgccctggaggaaaataatattaataataacaactgcagtgcctttgagaagccagcagtttggagtgtgggaaagatagctataaggtatatatatatatttttgattcctcttcacagtttaggacagaaataacctattagaggaaaatcttgcatctacattggaagccaagaagagtccttcacatgccagaaacaatgaggactttatgcgaagtacagagcatgcaggaccaggttagagaaggaccttcgggaccagcccccaagccacctcgcctgggagaggcatggactcacgaaagcaacagctctccaaaacaggaaagaataatccgattggatccctgggaagcagggtgtaaaactgcagaactgagccaagacgtgagtccctgctcccccatccctcctggccattctaaagctcaacatgcactcaagagaaccgtttcccaacctcgttagcaatcccatcagcacccataaatatgtttctattgacttctgtttcagtctttaacagtatcctatgaactatttcagtaaacagtgcaaggcaaaggaaaagaagattcaaagagcagaataaatctttaaaatgtgaacataagctctggccaactctgccttggtctgccaaggaggagcttagggcactgactgagacacagcacacggaccaggcacggatgtggccatcagggctctgccagcatctccagcagcgtcgctgagtggagagggaaggaagcttccagaactagaactagagaagaaggctggctggagtgacagagagaaagagagaaaaggctcagccaatcacagagttgcgaggcacctcggagaccctctggtcctccccgactgtgatgtggcacttgggggctctgtcaaggactgtccaggttcaaatcctggctccaccactcactagctgtgcactctctggtctcggtttcttaatctgtaacttgtggataaaaatagcatctgtcacataggacctatgtcagcataaaatgagataattcacatcaagtcacttagctcaggcactcaataatcatacgtgacatgatattacacacaggactttgggggctctgagaagccccagggacgtcccacagtccaatctctctctcgagaatgattatctcccaaattcctttcattaattccccacccccaccctaccagttctcccagagatgattaggttctgggaacaggttgccacaaaacattaatttgtttaagctatttattatgtaagatagtggttgaatatctggcccaagacagttaatggtgttcctgggaggctggctcattcaaaaccaaatcatgggtcaggtggcagttggtgaatgtagggaccaaacagcagtgtcccgtagcagaaggagcccagctctgggacacagcctggttcccaccacttgtgtgggccttggacacattgcttaacttctcgggcctttagttttctcactcataaaatgggcatgatcatactgtcaccaggattgctgggaaaagcaaatggggtcatatatgtaaagggcccccaacattgtggaactgaccgaatggtgtccccacaagtcaggagatccagttgggatttccagcttagctggaacttcaggcaagtcatttctttgtcaggatctgactggatcatatgcctgaaagtgttttaatgatgacaaaaatttgcatcttgtttactcagcactcttacatactgggcctcactgatatctctgaggctcagagaggtaaagtgatttacccagggtcacacagcaaatgagtggcaaagcaggagataagacactagttttgcaactgtaaatcaccagccctttctctctatgcctgtttgccccagagcttggggctgtataggctggtgggcaggctcacccccacatcagcctaggccctggcattgcttaccagctccttccccactggtgaggggacccagggaatatctgctgctgtccccagggactgacgtgatggggctaggttgtgagccctggtcggtctgcaagtgtcagataggatgatacattaaaagcacaaagcacagcacttggcttctctcaaatcctccatagatgtcagttagcttgagtactgccagattagaagctctcgtgggcagggattgtgtgttttgtgcctataaactctggtaactactaactgagaaaaaacacacagtaccctggggaagagcaggagttaggactgtggccaagaaagaatgcatgaaagagacagagaagaacggtcagggaagtaggagaaccaaggcggtattttagcctagaaactaagggaggagagaatgttcaggaaggaaaaggtcatggtgtcaaatgctgccaagaggctacagagggtaagaatgaagcttttttcctttggattttgcacttaagagcatgagaggcctttgtaaaggtgtcagtggggtgatcagatggcagaggacttcatggccaagggagaagagacagagaattagggggctccttccagcacaaccagaataactagcacttatggagcacttgacatgtgcccacccactgtgaagcatattttgtacaatatttcagtaattcctgtcaacatcctgcaaggtgtgctattgtccccatcctaacatgataagatcagatggcttaaataatttccccaaagtcacacagctaagaagaaggagatccaggagttaagcatggttctctttgatttcttaacttgagtcttaatcaatgtagggaagagaggaagaatagcagaaaggggccccaaggtggcaaggacccaggatctgggactcaggaggttgaggatgcccccttcttctgggtgctgtctatctgagccacttagtctaaaccaagagttactttgataccatacatagttttacaggctgaaggaacttctctgcacccctgattccataataagcccttttggcagtgtgagccaatgaggaagcttctggaagagagttgagccccgaatcctttgaagattaaaacaggcagggtatggtggctcacacctgtaatctcagcactttgggaggccgaggtgggaggattgtttgaggccagaagtttgagatcagcctcggcaacacagggagaccctgcctctgtgaaaaataaaaaaattagccaggtatggtagcatgcacctgcagtcccagctactcaggaggctgaggctggaggatcacttgaggctgggaggtggaggctgcagtgagccgatatcatgccactacactccagcctgggcaacagagggagactccctctcaaaacaaacaaacaaacaaacaaacaaaaaacaaccaaaccaacaacacacacacacacacacacacacacatatacacacagcattcacatgagcataatgttcaaatttccattatctcaactggtcctccaaccagcccatggtggacacacggaatcatcccatttgacatatgtgaaaactgaagctgagagattttgtcaggaactgaggcatctgagtgctacagggttctgctgagagtaaactgaaatcttgttctctgaccaatcctgccaagagaccaaggagaaggaaatcacagaagacagtccaggacgagtcattcattcattcattctgcatttatgtgttgaccacctactatgagcagaccctgttcaaggcagagatttagaggcagaaagacaacaatccctggcttcaagctggggagacagacgagaaaacagatggtgactcaatacttctgtaagtgccagggaagcccagaggccttggtgcaaggatgctgggatgggaggggctgcactgctaggaaaggaagcttgaggtgcagcgctacacccctgaacatgagcaatatcttccccattctggtgctcttatcaggacagggcagccagacaccaagacacctgtgggtgtcctgccgacccagacagccccgtcaacagaccttgtgctgtccactttctctgcaacctcaatagcaagccccggccagacactgccaatgggctgaggtctggggacagaacctggacccagcatgagtcaggctcaagacagtctcatccttgctagcagctctgcgtgacccgggccactcaactcacacccctgagccttgatttcttcatctgtccagtggggtcaggcctacccctataagccaccaggagaatgaaatggggtcatgtccatggcagggctttttcagccgtgaatctctttacgaagagcagaggctttttgtccaaggctcctggtgcattcccagcactgaagttcgggacagtcctcgcctcccgacaaaggcagtggatgagttaattcttaagctcttcagcccgtggagagcagaggcagagcaaagggcaggcctagaggcctcttttggaaatgacaagatccatttagcaatcaattagcacagtccccaggctccgggcctgcacactcggcagaaagaatgcgtcctgctgcactgattagaaacagatgcgctggcaaacagagctggccgagcagggccggaattcctgggcacccagctcctggctgggagacgggatttgttattacattctgggcaccgacacagggagggaggccaaggaaaccaagctaagagagcagcctgcctggagaatgtctacctttgagaagattcagaggcaggagggggaagaatgttgactctgttagaaataatctgggataaaattagttcagccaaatacagaatatgacttttgaccaacagatgctaaaattccaaatgtgacaaggccgacagatgaggaaatgagtgacttgggagcttggcaagtggcaggaggcctgaaatctctggtgtcttggaaaatgacgcccccattgccaacctcatttacagagctattgtgtacagggccccgcagcaagcccttcgtgtgctatctcatttattgatcacagccaccctcttatttcacccattttgcagatgagaaaactgagtcacacataggtccagcaacttgcctaaaattgcacggctagtaagtagcagatccagcgcttaaagccagctgtctgacttgagaggcccctctcttggccatgatggtattaattcctcttctttcaattcattccttctcccttaacaaatgaaagggcagctttgagctcctctaccacagtctcgaagcactgcaggaaaggtccactgcagtgtccctaacagtggtcagcaacctcggttatactctcccagtgacgaggggctcactgtctcttaaggctatgctgcctctaatcttggacagtttgcaaggttggccagtctttcttctattaagccaaaagttgggtccctgcaagcttgaggcgtcccccagcagtgctgcttctgccctccagattcccttagaaggcaactaattctttttccctaggaccataccaggccataaggatggccctatctttatttttttaagcagaatagcctctgtttgagcagctgctgccagcacgggcagctgtggtgctctcatctcatcaccgacacattcccctgacaccttccaacccatcgatgtccctggtgggtccgggcatggacgtgagggtcaaccaggtctcccatctcccagcagcacaaaatggaacagcctttaaaatattattttaatatggtttgtttgccattacaagaaagatacattctcactaaaggaaacgtagaaaatgcagtgagcagagcaaaagtgcctccccagagaaagaaaaatcacccatgattccacctccagccttttttgctatgcttcatttttaaccttgcttcgtttattctatagctacacatcgcatcctaccccaaaactggagagacagacaggagtacacagaaaatcacaacttagcaggacagaaaacctgagcagaaaccactgtgggaaccagtattggggcaggaaaacctgaaccgtaactggtaattgctggagtctcagcgtggacgagtctgagagtaaaaccccgagggagcccagttgcaggcgagccctcactcttgtgtgagtcttatctacaggagctctaacagcttctcacagtgatgatcagagaaaaatccagtgttcccagcaggaggaggtgaaaagtagccattctgaaatgcaccagagcattctgttctctgtaagaaggatggccgggcgtggtggctcacgcctgtcatgccagcactttgggaggctgaggcgggtggatcatgaggtcaggagtttgagaccagcctggccaatatagtgaaaccccatctctactgaaaatacaaaaaaattagccgggcctggtggtgggcccctgcaatcccagctactcgggaggctgaggcaggagaatcgcttgaacccaagaggcgggggttgcagtgagccaagatcacgccattgcactccagcaggggtgacagtgcaagactccatctcaaaataaataaataaataaataaggactgcgctcaatacaaactgttttatcatagcctaacctactggggctttatgagagcccaataacccgggggaagagaaatagccaactctagccccctctagccacccttttccacctaaggagggggtactgagaatcacttgtgaagatcacagcccaagggcacaggctcaccaacagactgaggcctaatcacaggactatcgaacacttcctttccccgcagcatctgaccaccaaatcactaaaggcctgttgactacagttccatttacccagtacatcatgtctggccatcaagaaaaaaattacaaggcataccaaaacacaaaaaaacacagtttgaagagactgagcaagcatcagaaccagactcagacatgggagaaatgttggaattaaatcagaccagaaatgtttaaaaaactataattaagatgctaagggcgaccaggcatggtggctcatacctgtaattccagcactttgggaggccaaggtgctaggatcacttgagaccaggagtttgaaactcgctctggcaacacagcaagacccctgattctacaaaatattttaaaattagctgggcatggtggtacgtgcctgtagtcccaactatgtgtgggaggctgaggtggaggatcgctcgagcctgggaggtcgaggctgctgtgagccctgatcatgcgccactgcattccattctgggcaacagagcaagactctgtctcaaaaaaaaaaaaaaaaaagcactcttcatttctgttaccacgcttctgatctctagcagagaatcatacaaacaaaaactgagggaatttgttgttagtagacctgccttgtgagaaatgttaaaagaagcttttcagagagaaggaaaattatatgtcagaaacctggatctccatgaagaaaggagaagcactagaaaaggaataagtaatggtaaaatagaaccacaggatgtcacaactggaaacactcttaaagatcatcctctcaagttgtggatggtagagctgagtccagagagggcaagtgacttgcccatggtcacacagtggcggtgcctggccaggagccaagggcttccggctcccagctcagggctctctccactgccacgcccacatggctcaaagtgagtatactcccagacagccagggagggctcaagttaggacaaggtttgttattctttgacactaagaggaataaatcaatcaagtcattcttagctaaaacaagtgacctcttaccaagagttcaaatttaatcataataaataaaaagagggaatggaaatcagcaatggtgcagcagaccacagatgaggtgatctggaagcacacagagcacttccattctcctcgatggccactctctctctcgctttccttcttcctctctcctacgctctcagttgccaccaccaacaacccctttggggtcattagacttgcagctcttgggtatgaggtactgacatcttgacacctggagaagagagtgggcgcacaggaccacactctccaatcaaatcagatccagagggcatgactagagggggaaagtcttcctatgactgctgggacgggttaatttgtggaaaacagaaatgtaagtggacaacaacatctagaaatcccctttaccagcacggaacttccagagacttaagttgcttcacatctctggtatcagagtcctcatctgtccaatttattctttcaatgtattccacaaaaatttcttgagtgcttgctgtgggccatgatctgctgggcactgggggacagccaagaggtttaaagatctcggttaccaagagaaactaagaacaaaagaagagaggctgggcacagttgctcgcacctgtaatcccagcactttgggaggctgaggctggcggatcacttgaggtcaggagttcgagaccagcctggccaacatggcaaaaccttgtctctactaaaaatataaaaattagccagacaaggtggtgtatgcctgtaatcccagctactcaggaggctgaaggtaggagaatcacttgaactcaggaggcagaggttgcagtgagctgatattgcaccactgcactccagcctgggtgacagagtgagactctgtctcaaaaaaaaagagaatattaattaaatactttttttcttttcaggcattataataggcaaaagggacacaatgattaacaaaaacaaatagtaagcctcatggtcttggaaataggattcacttagataacctgaaaactctcccactaataggcacctagaaattatggataaaatacaatagctggcctctgaaaagcagagctaagagctcaagtgagtaaggaaattcccagggaccaaaaattgagagaggagtaaatatcaaaggaataagcttttgagttaatgctgtagttgtatggggtgggggtaggaggtagaggggagtgaagaggttataaggaagcttttctgctctatcctagtctctgagtgggaaaaaatctcccccaagggctggaactgtggggcttcacctcatgtcaggtgagaaagtttgattgtactcctgcagtccaggaactcccaaactggtcatgtaacctaatgactatcttcaagacagtgacacccctaggattcctgacagtaacaaacacaaaactactctggagggcatgctctcaatgaaggctgcgtatgattcccacagagagagggctaccatagatgagctcatagtccaaaattacaagttatgtatgtgagcaagaatcagacagagtaagcaatagatttgatcaaccttgccaaatgttcaaccattagaacaaacatagaaacttcaaaataagtaagccttaaataattaacaacataaaggaaggggctcaaaacaagaaaaagaaagatgtcattacaaagaacaagcatatttggaaaatgcccaacttgaactgtagaactgtatttttctgtagaaaaatacagaaagccactgaaatgtaaaacccaatagatgaattaaatagcagattaaatgcaactgaagagataactggtgagctggaagatagctctgttgataatgcattttattgcttcttacgcaacagaatgttttttaaatttaattttcttcatttcttttatttttaaaaattaatatttttaattgaaaaatcatagttgtatatatttgtggggtacaatgtgatgttttgatatatgtatacaatgtggaatgattaaatcaagataattaacatacccatcatatcacctcacttgtttttggtggtaagaaatttgaaatttactcttagtttttgtttttcattttttgagacagtctcactttggcccccaggctggagttcagtggcgcaatcttggctcactgcagcctcaacttcctgggttcaagagatcctcctgcctcagccccccacaaagtagctgggactacaggcatccaccaccacacctggctaattttttgtattttttgtacagatggggtttcgccatgttgcccaggctggtctcgaactcctgagctcaagcaatccacccacctcagcctcccaaagtgctagaattacaggtgtgagccaccacggccagcccactcttcgttattttgaaatacacaatacatttacattataattgactttagtcatcctgctatgcaatagacctccaaacttattcctcctacctgaggaattccagctcaccagttattgcttcagttgcatttaatctgctatttaactcggactgtacaatttgaccaataacttcccctttcctgcccccactcccagcctctgataaccatcattctactctctacttctatgagttcagctttttaaaatttcacaaacaggcatatctcagagatattgtaggcttgattctaaactgtcacaaaaaagcaagtatcacaataaagcaaatcacaaatttgggggtttcccagtacatataagttttgtttacactgtactgtagtctattaagtgtgtaataacattatgtctaaaaatgtgcataccttaattttgttttgttttgttttgtttgagacaaagtctcgctctggttgcccaggctgcagtgcaatggcaccatctcggctcactgcaacctccacctcccggggttcaagtgattctcctgcctcagcctcctgagtagctgggattacaagcgcctgccaccatgtccagctaatttttgtatttttagtagagacggggtttcaccatgttggccaggctggtctcggactcctgacttcaggcgatccacccgcctcagcctcccaaagtgctgggattacaggcatgagccaccgtgcctggccacataccttaatttcaaaatactttactgctaacatgataacacagaaatacaaagtgagattatgctgttgcgaaaatggtggtgatagacttgctcaacaaaggcttgccactaaccttcaatttattttttaaaaaaagcactatctgcaaagcacactgaagcaaggtacgcttgtataagtgaaattatttggtatttgtctgtgtcggccttatttcacttagcataaggtcctccaggttcatccacattgtcacaaatgacaggctttcctttttcaaggctgaatagtattccatcatgtatatgtaccacattttctttatccattcatttgttgatggacacttaggttcattccatatcttggctattgtgaataatgctacaataaacatgagagtgtagatgtctctccaatatactgatttcatttcctttgaatatatactcagtagtaggactgctggataatatggtagttctatttttagttttttgaggaacatcctttctgttttctgtagtagctgtactaatttacatgcccccctacagtgtacaagggttcccttttctctacattctcaccaacacttgtaatcttttatctttctgataatagtcaccctaacaggtgggaagtgatagctcattgtggctttaatttgtatttctctaatgatcagtgacggtgagcattttttcatgaacctattggccattggcatgtcttcttttgagaaatggctgttcaggtcttttgtccattttaaaatcaggttatttatcttattgctattgagttgagttccttatatatttttgatattaaccgcttatcagatgtatggtttgcaaacattttctcccactttgtgggttgtctcttcattttgttaattgttttctttgctgtgcagaagcttttgggtttgatgcaatcccattcatctacttttgcttttggtgcctgtgcttttgggatcatatccaaaatatcatcacccagaccaatgccatggaggtttttccttatgttttcttctagtagctttatagttttaggtcttttaataatctttaatccattttgtgttgatttttgtatatgatgtgagataaggatccaatttcattcttctgcatgtgcgtaattgattatttccagttttccaaatgccatttattgaagagaccgttatttccccattgtgtattcttttgtgcctttgtcataaatcaattgaccataaatgcctgggtttattcctaggctttctatcctgtttcactgctgggtctgtttttatgccagtaccatgttctttggattacagttgatttataatgtactttgaaattagtagtgtgatgcttccagttttgttctttttgcccaagattgttttggctattcagggtctcctgtggttccatatgaatttatgaatcttttttttctatttttgtgaaaaactgacattcaaattttggtagagagtgcactgaatctgtaaatcactttgggtagcatagacagtctaataatattaattcttccaacccaccaatgcaggatatttttccatttatttgtgttttcttcaatttatttcatcagtgttttattttattttattttattttattttattttattttattttattttattttgagatggagtttcacgcttgtcgtccaggctggagtgcagtggcatgattgtggctcactgcaacctctatctcccagattcaggtgactctcctacctcagcctcctgagtagctggctctacaggtgcctgccaccatgcccggctaatttttcctgtttttagtagagacggggtttcgccatgctggccaactcctgacctcaggcgatccgcctgccttggcctcccaaagtgctccgattacaggcatgagccaccgcacccagcccatcaatgttttatgtaagttttcagtctttaggtctttcacctcctttgataaagttacacataattattttattttgtgtgttttcctactgtaaacgggattgttttcttaattttctttccagatagtttgctattagtgtgtaaaaatgctgctgatttttatatgttgattttgtctgctgcaactttactgaatttatttatcagctctaacaggctttttggcagagtttttaaggttttctatatatagattgtgtcaccataaaacagagaaaatttcacttgttcctttcctattaggatgccttttatttctttctcttgcctgattgcctacaatagaacattttaagaatagtattacgttgttataagttgcagtgttattttgagaccaatcattcaaaggataaagaaagagagattgattattttaaacatagatataacaagcttttaaacattaacttcaaaacatatctgtatctcacatttgaacagactagcttttgccatcatacatctcaaaccttacgtctcctttaacaaccatatgcatctaatgctgaacatcataggcctgttatcctagtacaacatctgatctctgtaccttatgccacaatctcaggtgaactgacagggttagtggggagtagtattattcctggaagccattcccaaaccaggtggctagcaatgccttacctacacacggaaataactgagatcaatataaatatatagcactgggctagatagtccattgtccacttggtaccaccatcacttcttttaagtcagataattacttttactactatgactccaaggtagagttagccaataagaaaacttgaacaagattggaaggtgggtagaagtaaggtaaaataatagccatttttttcaggttgtgacagtcagacatggatttgcaatttttccgcaagctcccactcagaggttgtacagaaactgcatttcatagcctttccacaaacttacttcacagtcataatggcaagatatggtagtttcttagactgtctcataatcagtggcttctcccagccccacccccaggctggaggtatggatgtatggatattacctggattcctagacagaggctaatggtttagctggaagggcagggactttgaaagaataagattaccaggcatggtggcttacgcctgcaatgccagcactttaggaggccgaggcgggcacatcacatgaggccaggagtttgagaccagcctggccaagatggcaaaaccccatctctattaaaaatacaaaaatgggccaggtgtggtggtgcatgtctgtaattccagctactcctggggctgaggcacaagaattgcttgaacctgggaggtggggttgtagtgagctgagatcgcaccactgcactccagcctgggcaacagagaatccatctcaataaataaataaataaaatatgtaggaaagatgacagggccataaaaacctaagccattcttgaagaagaacaagaggggaagatttgccctagtagatatgaaaataaaggctgccctaccagctatcaagacaaagctacagtaataaaaaaaatagtatggtattggtgcaagagtagactgatgaaatagaagaaaaagcccagaaacaaatgtagagagatatggtgctatggtctaaatgtttatatccccccgaaatgcatacgttgacatcctcctccccacggtgatgggaagtggggcctttgggaagtgatgaggtcaaggaggtggcaccctcatgaacaggattagtgctctcataagaagaggcttgcaagacaaccctcaccccttccaccatgtgaggacacagtaagaagttgccatctaagagccagaaagcaggccctcaccagacaccaaattcgccttgattttggacttcccagcctccagaactacgggaaataaatttctgttgtttttaagctaccagtttatggtattttgtgttagtagcccaagtgaactaaaacatatggaagctggatttatgacagaacagatgttatagtttaataggaaaaggatggaccacaacaaatgatactggcacaattggttgtccatatgtaaaaaagttaaaattaattcctcctacatgccctacataaaaagccatttaaagtagcttaaacacaaatgtgaaaggtgaaactataacaaaaattaggacatgatataggataatatagaacaataatttcataatttaggtcctcagggtagagagagacttcttaaataaaggacaaaacggcacctaccttaaaaaaaaaaaaaaggtcaggtgagcacagtggctcacacataacctcagctacccacgaggctgaggtaaaaggatcgcgtaagcctaaaagttcgaggctgcagtgagctatgatcacaccactatactccatccagcctgggtgatggagtgagacctcaactgtaaaaaaaaaaaaaaaaaaaaaaaaaagaaaagagaaaaggaaaaagaaagaaagaaagtgcatgaagtaattaagagcttctggttttcaagagacttcataaagaatgagaaaaaataagacacaaacttgaagatgacaattgcaacacatattacaaaggattaatttccagaacgtagaaagaatgcttataaatcaataagaaagagaaaaatagccccaaaggaaatagatgaaaacccggaattccactgaagatcaaaggcaaatgtgtaataaatatgagaatatgcttaacacaattgagaattaaggaaatgcaaattaaaatcacaaagccaaaattaaaagtttaaacaaacagactcaaagccctaccattccatgcttaccaactgggcaacaattaaagcactgacagtcccaagtgctagtgagcatgtgaagcaaaagaaattcaaatattgcaaatgggaatggaaactgatatcaccactggttgttaggtactaattaataatgttgaacatgtgtacactctatgacccccagtcccagtgataggtatataattactaaaaaagtggaaacattctctgtgtccataataagtagagtggatttatgtattgtgatatattcaaacactgggctactataccacagctgaaataaatgaacaacagtgatattcatcaacattaattaacttcaaaaatataaatttgaaggggaaaaaatcaggtcactgaagcatatatataatacaatatgattccatttgtgtacattctaaaagcagaaaaaataataataaattgttttaaaatacatgtggtaaaaactatacggaagagtaatcgaaaaatcaacataaaattcagaatagcggttacatggagactgcaacagaatacacttaaatagcagccaaagggagcatcccaggcattaaataatgttcaaactgttcaccgaagtgctgggcaccatattctttaacatatgttttgttttgttttgttttgtttttagacaaggtttgcattgttgccaggctggagtgcagtggcatgatcaggactcactgcagcctcgacctccccggctcaagtgattctcccacctcagcaccccccaagtagctgcaactacaggtgcacaccaccacacccggctaattttttttttaattttagtaaattaaattaaatttttaaaaaaatttttagattttagttgcccaggctagtctcaaattcctgagctcaagcaatcctcctgccttggcctcccaaagtgctaggattacaggcatgagtggtagctaacatatgttttatgtattatttatgtatgacacacaataaaagcaaatacacaaagggttgaagcaagcgttggagactgagggcccaaaaaagttccatttacataataaaactggtgtgttttaacagtaactatgccagctctaaagggtattggcaggccagacaatttgaggagaaaaaggatatattaatctaatcatatgtttattaacttattttcttaatatacaattttaaatcagaggtttttatttgtagacttattaaaaagagaacatggcttaaaatatccagaattgatgaatcatcagatacagaaagcacaattaatccttagaaagggaagtaaaaatgaaattccaggccggtcgcagtggctcacgcctgtaatcctagcactttgggaggctgaggcgggcggatcacgaggtcaggagattgagaccatcctggctaatacggtgaaaccccgtctctactaaaaaaaaaatacaaaaaattagtcgggcttggtggcaggtgcctgtagttccagctactcgggaggctgaggcaggagaaaggcgtgaacccggggagtggagcttgcagtgagccgagatcgcgccactgcactccagcatgggcgacagagcgagactccgtctcaaaaaaaaaaaaaaaaaattgaaattccacctaggatggccacaaaatttatcattctaactaggatattttttagagtaaatagagcactattaataattctgaaagggtgccaggtgtaaaccaggactgtccagggaaaatcagtaacatatcatcctctggagaaatagcagtcacagaacgtgttcctgcgcattcaaggtaaacggagatggacttcccagaggacgcacgctcagggcagtggccttgaggactccaagccgggatggtgctaggcctttcaagtcgcccgagagcaaagtggtatcaggatagcacagagcaaagaagataaagaaactcaagagcccatcaggtgtcccgcccccaggtgcgacggccagggccacatcaccgggtagtacgcgtcccactgtagcgcctccgggtgccccttggcagccaagcggacctgaatggctcccagttctcctggaagtcggtcaggacggaaggcatgtcctgctccacggcggggtgtaacggctagggccacgtcagcagcagcttcctcacacaccgcaggcagttcctgtctgaaaagcacccctatttatacatatggatcccagtgtctcccagaaccctgcatgaggacaggggccttggctgctcaccaggacccctcagggcccagcaggccggggcaggtgcacggaaccccgtagcgtcagggagccgcctcatccttcccagtgagtgtgctcctgcgcgggccgccccatgtcctgtccaggtttgatgattacaaagaactacatgtgaacttccttctgcacatagctccatgcccttgtgcaatcagatcttcaggatctattcctggaaacaagaatgctagctttaaaattttgatagatcgtgccaaaaaggcctccaaaaagtttctacttaccctaacctttcgccattaacaaaatattttaaaacaaaacaaaacaaaacaaaaaaaaagaaagaaagaaaaagaagaagaaaagaaagaaacagcagtcacagagaaaatactgattgccagtactggctgacagcagacttctcaacggcaacaatagatgtcaggataagatgagaaaatattggccaggtgcggtggttccctgagcgtgcatcctctgcgcctgtaatcccaactacttgggaggctgaggcaggagaatggcgtgaacccgggaggcggagcttgcagtgagctgagatcgcgccactgcactccagcctggacgacagagggagactccatctcaaaaaaataaataaataaaaaataaaaaagatgggaaaatatcttcaagttactcaaagaaaataatggtcacctagaattctatccccagatagatgttatatgaaagaaaatgacttttgctcaaatgaagaaagagtgttttttaccattacgtaccaatgtgcaaagaactaaaggatatacttcagggagaagaaaattgaatatagaaaaaggaacaagaagcaataaacaacgatgagtgaacagactggtagagttaaagataaaactgaataagccatgccatcataaaacaatatgaatttttataataaataatttaaggatattgaaataagatacattaaaaaactgaaaaacaatatgtaagctaggaagaaaatgatcatacttcaagtatcaaatagttcctacattatctgggaaaaatataaagatgttgaataattgctaccctgtcaagtaaagaatacgtatatatatatatgttaaagatttaagaataacactaaaaggatagaaatagtattcacaggtttcaaattagtagaggtgaaaaaaagaaacaaaaacaactagatcaacccaataagagccaagaaatggggggaaaaaagaggaaaagctggctggacacagtggctcatgcctgtaatcctaggactttgggaggccaaggcgggcggatcacctgaggtcaggagttcaagaccagcctggccaacatggtgaaaccccatctctactaaaaatacaaaattagccaggcatggtggcatgtgcctgtggtcccagctgcttgggaggctgaggcaggagaatcgcttgaacctaggaagtggaggttgcaatgagccaagatggcaccactgcactccagcctgggtgacaagagcaaaactccatctcaaaaaaaaaaaaggaaaagcagagcactagaaagaacaaaagtaatataaattagttctatatgtcatgcatattaaccaaaatgagataatcaatacaacatatcagtaatcagagtacattttcaaatgttaaaggatttactcgggagatagagattctctgattagattaaaaaaataaaagttgcatatatgctgtttataaaagacacacaactaaaacacaaggactcaaaaaagctgaaacttttatttaatgataaaagataaactaggcaaatattaatcaaaagaaagctgttgtaacaaatctctggcaaaatatattttaagtccaaagcattattagaaataaagagtcatggctgggtgtggcgactcacaccctgtaatcccagcactttgggaggccaaggcaggtggatcacttgaggtcaggagttcaagaccatcctggccaatatggtgaaaccctgtctctactaaaaatacaaaaacattagccgggtctagtggttcatgcctgtagtcccagctactcaggaggctgaggcaggagaatcgcttgaactcaggaggcagaggttgcagtgaatcgagatcacgccattgcactccagcctgggctatctcaaaaaaaaaaaaaaattaaaaaaattttaaaaaaaggaataaagagtcactatataataattaaaggagttaatcaaaaaggttgaacatctcggaacttttatgcttccagttaacacaacctcaaaatatgttaagcaaaaattaaatataaaaagcaaaaactgatagaattacaagatgaaatttaaaatctacaagcatagtgggagaggttaacatctcttagaaactggaatttgaaattgaattagaaatagaaatatccaagagacaaaaaaccaagttaggctgtagattaaacacagtaagtttaatctaatgaacatatggagaactccacaaccaacagctacagaatatacatttttaagcttcatgaacattttgaaaattgattttgtactacaatacaaagcaaatcaagaaccaatattatgtagactacattctctcatcacaattcaattaaattcaaaatcaataacagcacaattttaaaaatttaatgtgtttgggaaatgtaaaaacacacttctgaacaacaaatggatcaaagaaaaaatcataatgaagattagaaaatatttacaactgaatgatataattctttgtgtcaaaatttgtggaatgtagctaaaagcagtaattagaggaaaagccatataagcgtatattaaaagaaattggaaaattaattgaataaatatcagattcaagattttctataaactatgtcagagtaaatccaaagaaaatagaaggaaataataaagaaaggaacagctattaataaaatagaaaacaaagaaacaatagaaggggtaatcaagtctagttatttgaaaataccagtagacagaaatttgatctgattgatcaaaataagaaaaggtacaaataaataatattagcaattaaatatctacagatataatagatactttaaaaataataagtaaatactatgaacaagattatgccaataaactgggtgaaatgaaaattttcacagaacaaaaacacctaccaaaactgactaagggctgggtgtggtggctcatacctgtaatcccagcactttgggaggctgaggcaggaggattgcttgaatccaggagtttgaaaccaacctgggcaacagagtgagacctcgtctctacaaatacataaattttttgaaataagcagggcatggtagtgcatgcctgtagtcccagctacttgggaggctgaggcaggaggaccaccacactgcagcctgggcaacagagcaagaccctgtctcaaggaaaaacaaaaaaaaactgactaagaaatagaggatctgaataaacaaataatcattgaaggaattaaattcctgttttagaaatttatccccacatacacaaacacacaatatgtggtccaggtgattttacaagttagctctactaaacattcaaaaaagagataaccaacttcatgcaaacgattccaaagaacgggaaaagaaggaaaaccttcaaactattttatgaggtaaatataaccttgatatcaaaaagaaacaagaaaaatataagaaaggaaaattacagcacaatctcacttttgaacaatttgagatgcaataatcttaaataaaatgttttgaaaccaagcgctcactacacatgtactaaaattagaatgacacagagtagattatcatggtccctgtgcagggatgatacacacattcatgaaggattccatattttttcatctcgccccagttaaaatggcttctacgcaaaagtcaagcaataacaaatgctggtgagaatgtggagaaaaggggaaccctcgaacactgttggtgggaatgtaaattagtacaaccactacggaaaacagtttggagattcctcaaaaaactaaaaacagagctaccatatgatccagcaatcccactgctgggtgtattcccaaaagaaaggaaaatagttcattgaagagatatctgcactcctatgtttgttgcagcactattcacaatagctaggattcagagtgtcaattaacggatgaatgtacaaagaaaatgtggtacatatacacaatggagtactattcagtcataaaaaagactgagatccagtcatttgcaacaacatggatggaactggaggtcattatgttaagtgaaataagccaggcatggaaaggcaaacatcgcatgttctcatttatttgtgggatctaaaaatcaaaacaactgaactcatgaatgtaaaggatggttaccagaggctaaatggtagtcgggggctgatggggaggtggtgatggttaatgcatacaaaaaaatagaaagaatgaataagggctgggcatggaggctcatacctgtaatcctcatctctactaaaaatacaaaaattagctgggcgtggtgccaggtgcctgtagtcccagctacttgcaggctgaggcaggagaattgcttgaacccaggaggtggaggctgcagtgagccgagatcatgcactgcactccagcctgggtgacagagccactattttgatagcacaacagggtgactatagtcaataataacttaattgtacattttaattaaagagtgtaattgaattgcttgtaactcaaaggaggaatgcttgaggggatggataccccattctccatgacatgcttattttacattgcatgcctgtatcaaaacatctcatgtaccccataaatatatacctactctgtacccacaacaattaaaaattaaaaaaaatttcttttaagttcacaaaccaatacagcattatgtactataataacaacaaccaacataaaccagcaaagtttatttcaggaataaaaggatggcttaacattagaaaatctgttaatataattaacaggaatagatcaaaaagggaaattatatatagaaaaattatttgaaaaaactaagggctgggtgtatatccatttgtgatctatgctatggtttgactatctctgccaaaactcatgttggaaccttaattctcagtgtatcaatattgggaggtggtacctttaagaggtttattaggttattactgtagattaatatctttctctagagactcaattagttcttgggaatggattcatttccccaagcaggctttgtttttgtttttgtttctgagacaggtctcattgtgtcacccaggctggagtacaatcatagctcactgcagcctcaaatttccgggctcaagtgatcttcctgtcttagcctgtagagtaactgggactacagatgcacaccaccacacctgactagttttttttttaattttgtgtagagatgaggttttgccatgttacctaggctggtctcaaactcctgaactcaagcaatccacctgcctcagcttcccaaagtgctcccaaagggattacaggtgtaagccactacgcccggcctagcaggtagttataaagcaaggttgcctctcatgtttggtctctcagcacatacccacttcctcttccgctttcccaccatgctatgacacagcacaaggccctcaccagaagccacccagatactggtgccatgcctcttagacttcccagcttccggaaccatgagtcaagtaaacctcttttctttacaaattacccattctcagggattctattataacaacacgaaatggactaagactatatatataaatatatatttttttaattcttagcaaactaagacttgaaaaaaactttataactttaaaagggtgtatctataaaaacttaaagcaaacatcatacttcatgggcaaaatactcctcaaagcattctcttcaaagttaggatcaagagctgcctattcttacctcctctattgaccattattctggaggtcatagccagtgtgtaaagaccagaaagaaaatcaaagctgaaaagtcttgaaaggaaaaaatgaaactgtcattgtctacagtttatagcattgtccataaagaaaatccaagaggaggccagcatgcccatagtccagctactcaggaggctaaggtgggaggcttgcttaggctcaggagtccaaacttgcagtgaactataatcatgccactgcactccagcctgggagatagagtgagaccctgtttcttaaaaaaaaaaaaaaaaatccaagaacagcgctttagaaaagtgagaaaagtctgggtgctgttgcttacgcctgtaatcccagcactttgggaggctgaggtgggcagttcccttgaggccaaaagtctgaaaccaacctgggcaacatggcaaaaccccatctttaccaaaaatacaaaaattagccaggtgtagtggcatgcacctgtagtcccagctactcaggaggctgaggcaagagaatcgcttgaacctgggaggcagaggttgcagtgagccgagattgtgccattgcagacagaatgagactctgtctccaaaaaaaaaaaaaaaaaagtgagaaaagggctggataaactattcgtgtgcaaaaatcaactgtgctcctataataagtacgaatgattttaaaatgtaattttttaaaaatttcatttactatagccaaaaacctgtaagatacctaaaaatgaattcaacaaaagttatgcaaaatatttccagagaaaaaaatgtataactttattaagacttttaaaaaactaaaaaaaaaaaaagagagaaattatgttcatgaatgggaagtcccaggttcataaagatggcaaacctctctccaaacagtggatcaatataatgcaaatgcaaacaaaatttcaactctgtgtgtgtgtgcacacaatctgacaaactgctcttacaatttatatggaggagctcaggccctaaatagacaagtcaattttggagaacaaagtgggatgacttaccctatgagatagcagaacattttataaattatagtaattagcacagtgtgctattggcataggaatagaaaaataaaccaatggcacagaactgagcccagaaacaggtcttagtctttgaggaaacctcgtctatggcagagatggtattacaattgaggctgggaaggggtgatagtctagtcaataataatgttggaaatattggttcctcaaatgaggaatagagggaaaaaatagattcttacatcacacaatagacagaaagcaatttcaggtgaattaaagacccaaatgtaaaatgcaaagtttaaaacttctagaagaaatcatagaaaaaatatcagagaaagattttttttttttttttaacagagtctaactctgtcacccaggctggagtgcagtgatgcaatatcggctcactgcaacttccgcctcctgggctcaagcaattctcttgcctcagcctcctaagtaggtgggattacaggcgcacgccaccacgcccagctaatttttgtattttttgtagaggtgggatttcacaatgttggccaggctggtctcgaactcttgacctcaaatgatttacctgccttggcctcccaaaatgctggaatcacaggtgtgagccaccgcacccagccagaaaaaagatttttttgtttttgtttttttttgagacggagtctcgctctgtcacccaggctggagtgcagtggtgctatctcggctcactgcaatctccgcctcccgggttcacaccattctctctcttcagcctcccgagtagctgggactacaagagcctgccaccatgcctagctgattttttgtatttttactagagacaggatttcaccatgttagccaggatggtctcgatctcctgacctcgtgatccgcctgcctcggcctcccaaagtgctgggattacaggcccggcccagaaaaagattttttaagtaatcataaagcagaaaggaaaagattgttaaatctgatgacaatgtccttaacagagtgaaaagatgaagcatgttgtttcttataaagttaaatatgcaccatccctatgatccagcagttccactttgaggtatttacccaagagaaatgaaaacacatgtccacagaaagacaggtacaaggatgtttatagccatgttcctcacagtggccaaaacctgaaacaatctacatgtccagcaacagaagaatggataaacatattgtggtatatttatacaatggaaatcttcttaacaataaaaatgaaatctacataacaacatagatgaatcttaaaaacattatgctgagcacaagaagccagacagacttactgtattctttctattacattaagttctaaatcaggcaaaattactacatattaatagtaaaagaagtcaaaccagtagttgtcagggaaagggcacgaaaggccttgctaggatggtggaaatgttctataacatgacagaggagtgggttcatagctgcatgtatttgtcaaaagccatcaaactaggcagggcgcagtggctcatgactgtaatcccagcactttgggaggccgaggtgggtggatcacctgaggtcaggagttcgagaccagcctgaccaacatagtgaaacccccatctctactaaaaatacaaaattagctgggcgtggtggcgcatgcctgcaatcccagctacttgggaggctgaggcggagaatcgcttgaacctgggaggcagaggttgcaatgagtgaagatcgtgcccttgcactgcagcctgggcaataagaatggaactctgtctcaaaacaaaacgaaacaaaaacacaaaaacaaaaacaaaaagccatcaaactgtagcaattaagatttgtgtaattaactgtatttgaaaaatcagccgggcatggtggctcacgcctgtaatcccagcactttgggaggccgaggtgggcagatcacgaggtcaggagattgagaccatcctggctaacacgatgaaaccccgtctctactaaaaatagaaaaaattagccgggtgtgatggcgggcacctgtagtcccagttactcaggaggctgaggcaggagaatggcgtgaacccgggaggcagagcttgtagtgagccgagatcgcgacactgcactccagcctgggcgacagagcaagactctgtctcaaaaaaaagaaaaaaatatctctcaaatccacttccccaacccactgcaaaaagacaaactatagtctgggaaaaggcattcgcctgataagagattcatgtgcaaaatccacaaagaactgccataaatcaattctgaggaaaaaaatatcaaatagaatagtcacaagaatacaaacaggcaatttacagaagagaaaacatttggaaagatgcttaacctcaccactaatcaggaaaataacacaatagcacttcatacccattggattcacaaagttgttgaaatctaaggatactaaacactggtgagactgtggagaaactggaattcagacagtgtactctgcttgtgggaatgtggacaggcagtgcctaggaaaagtgaagaggtccctcgcttgtgatccagccattcctggcaggtgtgtctttagctggggggcatttgtatctctcatatgtgcacaaggggaaccctcactgcaccactgtttgtaaccaaaaaaaaaaaaaaaaaatggaggatgggcagaaatacaaaaaagaaaacacagaagccacgtgtggtggctcacccctgtaatcccagcactctgggaggccaaggagggcagatcacaaggtcaggagttcaagaccagcctggccaacatgatgaaaccccgtttctactaaaaatacaaaaattagccaggcatagtggtgcatgcctgtaattcctgctactcgggaggctgaggcaggagaattgcctaaatctgggaggcggaggttgcagtgagccaagatcacgccattgcactctagccctgggtgacaggggaagactccatcttggcggaaaaaaaaaaaaattagccaggcatggtggcagatccctgtaatctcagctacttggaggctgaggcaggaaaatcgcttgaatcccggaggcggaggttgcagtaagcgaagataataccactgcactccagcctgggcgacagagactccgtctaaaaacacacacacacacacacacacacatatgggtctaggggaaaggcaaactaaatgtctatcatgtctatcaacaggggaatggatacagtatggtatgtccacgtaacagaataaaaatcatcagggaaatgaattacagggtacacacaatgtcataacaaaatgtgttaaaaaacaggttacagtagactacaaattgtatgtttccatttatataaagtttgaaaacacagcaaaactaaacaatctattgtttagggatacaaatatatttggtataagtataaagaaagcatgaaaatcacacacacaatttgggataatggttactgaggaaaggggaggggctgaggagggcctcagaggggactttcaaacgaatggttatattctttttcctaaatggagtggtgggtacgcaggtatttgctgttgtcgttaatccttagacactgcacacattttataaatatatctaaacatttatacacgtaatgacagcaagttctatagatgtgtattgaaacttagaagctttcaatcatctttatatcttcaaaaaaacatctgaagcaaatatggcaagtggtaagattggacaaagttgggtcatggataacaggtgttcattagtcttttaaaatatataataggggctgggcacggtggctcacacctgtaatcccagcactttgggagactaaggcaggtggatcacctgaggtcaggagttagagagcagcctggctaacatggtgaaaccccatccctactaaaaatacaaaattagctgggcatggtggtacatgcctgtaatcccagctacttgggaggctgagacagaagaattacttgaacccgggaagtggaggttgcatgagccaagattgcgccattgcactccagcctgggcgacaagagtgaaactccatctcaaaataaataaataaataaataaataaaaatagaatttttaatagtaaatgttctttaaaaagaaaaacaatatccctatttgaagataaagatttatctgttctcgttagtttccagcctggtgggggagattaagacaataatcaaataatggtttttatgaaataaaactactaactaaagcagtgttctaaagacaatggaatcactccatgggagcataaaataaaggaatttgatccgggctggagtgtcaggtcggtaggtagagtgggaatcggggccagtgagggaagcacacagatggttcagcagtgggcagtgaggaagacgccaggggaggagaggaagggctgctccctgaagccttctgccaaaggggatgacctagcagaattccaaattatagggctcagacaaagaagaaggcaataagagtgttctgtgcagtgagagcatcatgtgctaaggcaaagagatgtgagagaagaaagtcaatctggaggcatctgagtagtccaggaggctggaaaatggggttggggtggagtgtgaataaggggcagaatacgaggccaagagccagccaggactggtcattagggcctgtattccatgcaaggtagggacttaagcaggggtgtgacatcatctgatgacagagagtggattgagagggagagcccgaaggcagggcatccagctggtggctgtgtagtgatgtaagggagaaaagatggaggctgaagtggaggcataaatgagaaggttatggagcctagggctgttcctgaaccaggagagggtggcgtgtcagaagccagggaggaccgagctcaaccatgtcaaaagctgcagagagactgctgaaacttgggacttaaaggatcaccttgatgtgtcaactaggagatgagaacagttgctgtggaatgaggtggggtggatgcagaagtcagcctgcagtgctgtgggtgtttcatgtcaaaggctgagagacagggttggagaaggcagcctcaggccaaggatgggggctcagagctctcttccagagtcttccactccctgccccagtcccaacctgagctcactccaagcaatcaacatgaaaacaaagggagagtgtctagcagaggccttcccatctgcagagcaaggaagtctcggtcccaaggtcaatgctgaagaggaacttgcttggtggtgcaggtcatggagccagcaagattcttgataaacaggagaggatggtggcaccggaggtggatgtagggggtttcgtgaagtgatttggcactagggtcaagaggaggccaaggataaacaatgttgtggaaatgaaatggtgataatttacaagggcaaattgttttacattccagcggagttggctcccaagccgaactcttcctgcagaagttgaggtggtgtgtgagtcattgttataaatagaccggccaactgaatgtcatcggaaaggacacagtcccatgagtataaccttggagggcgcaaatggcactgcatggattgagagcttgttccaagaagagggcagagggagagcttggggcacggggggctgtccaggagaggaagcagatgctgaagaagggggttccagctcaagcagcaggctgatgcagaggactggccaggagcaagcttcctgcatggctcagtggagcccagctctcagctgcctagctgctagctcaggctgggtcgtctcactttctccatctacttgagctgccgtaacagaataccacagacctagggggcttacacagcaggaatcgatttctcacagttctggaggcaggcagtccaagatgaaggtgccggcagcgctagtttctggcaagggctcttctttggctagcaggtggccaccttctcactgtgtcctcacatggcctcatctctgcgtgtggagagagagctctctggtgtctcttcctcttcttagaaggacaccagtcctatgggactagggccccagccatatgaattcatttaacctttattacctcctaaaagctgctgtctccaaatgtcgtcccatggggagttaaggcttcagcagatgaacttgggtgggggacacaattcaatctataatacttgccttctagaaattcttccaaagaattccaactcttctagaatcccaagacactccattaaccaaagcacaagaaaatacaattcccaaccggcaccagctcattcattcattcattcattcattcatcaccatggatgtgcgggtcctgatgaacactagggacagagaagggccttgccttcacattcataatgacttcaaaacaggggccctgagctcttaggaaacttctggaagaggagaacgtcatagacatcaagcactttcccctgaggaaatctgagtccagccacacctggcgtgaaagaggtcgcccagagcctttcctgcccccgcagtcaggctgactgcccccatctcagctcccacgagcccctgtacttcatcctttttttttttgagatggagtcttgctgtgttgcccaggctggagtgtagtggcacgatctcggctcactgcaacctccgcctcccaggttcaagcaattctcctgcctcagcctcctgagtagctgggactacaggcgcatgccaccacacccatctaatttttgtatttttagtagagacggggtttcaccatattggtcaggctggtcttgaactcctgacctcgtgatctgcccacctcggcctcccaaagtgctgggattacaggcatgagtcactgtgcccagccgatcttataggtcatataaaggacttaactacccagaactaagagaaggcccaaagccaagaacaaaaggcactaagaacccggcacctctgtgccccaaagatgaggctgggcctgcccagccacacccccgaaagggaccacgaagctatggaatctgccccaaatgtgtcaaaggacaggaaagggaggactctcatcgcatcatggaaagcaatgtgaaaaaataaaaccatttcctgtttagactttcatgaatggacattccgcgataaaccacaaatcatgggattattgtatctgctcccacaatgaggcctgtgaactctttgaggggtagagatgtcatcccctctgtccctggcgcctgcagcagcgtcagtcacagtcatgcttggtgtcaatgcccaggggcctgtgttctcagtatagggggcaccttggctttgaccttgtatttcttttctgcgggacaagccagcccctcagaaccagaagcaaccacatctcacaccaggcaccaaacacagggtcctcccccatcttggggctctggtctctgagtgcaacttgcttttggggagactccacagcctgtctgggagcttccaactccacctcggggttgcccctctttccttttgcggtgtgggggtccagggtgtgcagtgcttggccagggagggagctccctttaaagatcactagcctgaggttatcaagaatgagccagcagggaagcacagccctcccggccgcccagacaaagctcaaacccaagctagtctgttttggtggagcgaagaagaagcaagaggcagttcctaagagtgggcagccctggcctggacaggatgactaagaggctggagctcgtgcaggctgtttgctgacccactgacttgcggggattttccagccaatgtccttctaacactgccccgaagcgagtgggggtgaagggaatgagctcctgagccaccagcccctcaggtaccccagacagcaggcagtaggcagcaccacccaggtctcattccacagttggggaaaccagtgagaggtgaggccagctggtattccttggtgtagtggggacttggggagcttttcctattttacaagaggtttgtaaaatgcaccaaatcaggaactttcctgtcttacaaccggattgtaaaatgcaccaatcagtgctctgtaaaacacaccaaacagcgctctgtaaaatgtaccaattgccaggattctaaaagtagccaatcacggggtggattgaaaaaagggcactctgataggacagaaacggaacatgggaggggtacaataagggaataaaagctgaccactccctcctcccctgcaaactagcaggggtaacctgctcgggtcgtcttcggctctgtggaagctttgtcctttcgctctttacaataaaccttgctacccctcactctttgggtccatgccatctttaagagctgtgacactcgctgcaaaggtccgtggctacattctctaaatcagcgagaccacgaacccactggcaggaaccaactccagatacaccaggaccagagaggagaaggaccctcccaatatgacacagggagtcaacgcagcacgaaggagtcagtgctaagtgcagcaggcatgggaggcagtgaaggtttcagggaggcggtgatgagcccaatgagggggtggctcaaactggccacatagagggaggatatgggaagaactcagtgggcagcccagaggaaggagaggcagaaacagatctgcactgaactcccggatagagatcttgggtcgtatcaacaaaattgacacggaagggtggggcctgctgaggggaggggagggaggggccgaagatgacctcttatggggggggtgcctgagtggctggcagcatcattggcagaaatagagaagttgggcgtgggtggggggggcgggctcaaattcaggcaggtcattttgagggacgggaaggacaagcccatttcccatggaaataagaacagtaggggggtaaggtccagttttgtgaatggggctttgaagtgagctagacgtgagctctagtctcccaggctctgccatccacttactgtgtgacccagtcaaaccattaacctctctgagcccaggttcctcacctgtaaactgtagggaatcattgcactcccccatagggttgtcataacgaccaagatagggtgttacaaggactaataaatatttgctgttgctttcattattcttttccaaatgcttaatatatatcaactcaattaatcctcccagaagcctgtaaagcaggcactgtttttttttttcccaatttgcagatgaaaaaaactgaagattcagagaggttaaagaaattgcttagggtcacacagcaaggatgggagtctgttcaggaatttgaactcagattctttttttttttttttttttttgagatggagtcttgctctgtcacccaggctggagtgtggcatgatctcggctcactgcaacctccacctcccaggttgaagcgattcttcagcctcagcctcctgagtaactgggattacaggtgcctgccaccatgccctgctaattgttgtatttttagtagaggcagggtttcaccatgttggccaggctagtctcaaactcctgacttcaggtgatccacgtgccttggcctcccaaagtgctgggattacagataagccaccgtccctggcctgaactcagctccttctaaagcacaaacttcccagcatgaggttgtccctccactgccttcatggagctacagggctgcctcccacttccaggaagagggggagtcaagaggctcagagagtaggagataggtttgaacccatagaacaagaacccagaaccgcctggacatgatttagacaatattatttgtcttcaatgcacctgatcacattttcttttttttttttccctccccactttttttttctccagtcaataagactactctcaaatccagtgagtcaccggaaaatgtaaattaaaaaaaaaaagtaagaggaacattgctcctacgtaagctcttgccatctgtgaatcattccgagacaggtataatggacataattacagctcatccacaagctagaccccaaatcagtccttaagactgagttcagaatccagtggtttccccagcaggacctggggcagtgaaagctagcctagaggagaacacaaacctgaaatgtgcttagaggccttggtgatctcacagggggcccaggcggggtggaaacctggatatgtatgccctgattccagagacccagcaattccagaactttcctcccactcatgttctccccatcccacacactcaaggcacctcctcctgtttgaattcattctccttttaccagatctttattcttctggtcactgcaaaaccattcaacctagccaaaaagtgggagggatagtcaatttattatactacaggctgagtgcggtggctcatgcctgtaatcctagcactttgggaggccaaggcaggcagatcatgaggtcaggagatggagaccatcctggccaacatggtggaaccccatctctactaaaatacaaaaaagtagccaggcgtgatggtgtgcacctgtagtcccagctactcgggaggctgaggcaggggaaatcaccaacccaggaggcagaggttgcagtgagccaagatcatgccactgcactccagcctggtgacagagcaagactctgtctcaaaaaaaaaaaaaaagctggatgtggtggcacgcacctgtaatcccagctacttgggaggctgaggcaggagaattgcttaaacctgggaggcagaggttgcagttagctgagatagtgccactggactctagcctgggtgacaaagcgagactctatctaaatatataaataatatatatataatatatatattatataatatatattatatatataggatagtcccttctgtgtacagactgcctggacctttgctaatcactctttgcttctctttcctcatctgcaaaataggaaaacaatagccccttcttcatgggggttttgtggcaattaaatgaggtaatgtatgtaacacccttaagaacaatgcttgtgttcagtcagtacctagcaattattatcatcatcatcttcttcatctcgggaggtgggaacatcgaaagctctcatgtaagatggcaactacgatgaccccagggccctcccattctgatggccagtattaggaatcacaggagcaccagagtgagaatgctggagctagaagatcatccagcctcagcagggaaactggacccaaagaagagcagagaccagccccgagccacccacttggttagtgtcagaggcaggacaggaaccctggccttctgtgtgcaggccatttttctcactctagcacatgtgattcctccagtcccagaggtcaaggtcagaagagcaacttaatacatctctgtaatcaggggagatgagctccttggacattggaaacattgtgctaatccactccaaaatattctagctcaaggccaagtgcagggggcttatgtcagtggaagccccactccttcaatgtcagtacaagcaccaaaaggaaaagaaaataccccaagatattctaagtggctcagccttgggagagaccttaccctggaatttccctgaaatgtcatcaggatgcagggtttgaagcatgttcctttccaaccggccctcccagtcccctctacatggctgtacccttagacccatcagctcactgcctcctcactgtcctggggactcctgcacctggggactcacatttcttatggtttttcctttcccccagcagtgattcagcaaatgcctgttgcactctaggctacagagatgaaggcatggtctctacccttccagagctcacaggctggccaggagacagacaaatggataaccagaatatagtaggagaaagacctttctgggctgggggtagcatagtagagaagctcagagaagctttcacaagggtggagagagtcccactaggctgtggagggtgagttgaattcactgtgcacacagagagggataagccaaagtgaggagtcacatggggagactgatggctgctgtgttctcccaaccaaaccaggtgcatccttcaaggacctgaccaaggctgactcctacaggaagccttctttgatacaaaggttgcaatctcacttctctgaacctctgtcctaattggtctatgaccattccatgcccttccctcccccactgctggggccccttggccaaacttgccaatctacagtaccctgtgctagagccaatattgacctgaggcaggaattaaaggcaggtctcaggccggggactgtggctcatgcctgtgattccagaactttgggaggccgaggcgggcagatcacttgaggccaagagtttgagaccagtccggccaacatggtgaaaccccatctctactaagaatacaaaaattagccatgcatgatggtgcctataatcccagctactcgggaggctgaggtgggaggatcgcttgaacccaggaggcagaggttgcagtgagctgagatcatgccactgcactccaggctggatgacagagcaagattctgtgtcataaataaataaataaggcagagctcaaccccagactgtccccaactgcaaccattgtcatttccccaagctgcctttggctgctgccttctgccagtgatctggggcagcaagaggtttaaagagaaagcttgccatcctaagtcccaggaagtcagctcctgggactcaggggagcccttggttctgcatctatgggaaagcatcagaagcagctgccctcacctgcccctgctaccttggaacacagtgccccacccccatcagtcaggaatatatccacttggctgcaagtagcaaaaagcttagttaacacaggcttcagcacataagggtctgttttgctcaggtcagatgtcctaagatagacagtttcagcagatgcagctgttcaaatttgtcaccaaggacccagactcagtctgtgttcctaaccatcacccttagaatttgaatttcattctcacagtcgcaagatagctgcattatatccacactggggtgggccagccacgtccatccctttaaaaaagccatcctggaattccaccttgtgacttttggttgcatctcattggccagaaccaggtccatgtctacccctggctgcaagggggtccgggaaagtcagtatttttacttttctgcttttatggtaaagcagtggtgctttaacttgagaacaacaaatcggctggggaatcttgttaaaatacagattggggacccaaattcgacatttctaaccaatgctgctggttcttctatcacacgtggagtagcaagttacataagaagcaagaaagggcctgcgcggtggctcacgggtataatcccagaactttgggaggccgaggtgggcggatcccctgaggtcaggagttcgagaccagcctggccaacgtggtgaaacccccatctctactaaaaatacaaaaattagccaggcgtggtggtgagtgcctgtaatcccacctacttgggaggctgaggcaggagaatcacttgaacctgggaggcagaggttgcagtgagctgagatcgtgccactgcactccagcctcggtgacaagagtaaaactctgtctcaaaaaaaaaaaaaaaaagaagcagcagcagcaagaaagaagggggctgtgagtggcttctggagagatcatctatagagtctaaaacacccctagcacctgcggctacttcaggagctgggagctgtgcccagcatcccacacttgggacaaaattcacccaggataacatctacccagcacctccacagcagctgcagcctataacaagatcaagtaaggttggtccctcactcagggactcctacacaccagcgactcctggacacataaaaggacggggactggggccttggctgggatgggctgcacttccagaccttatgctaccactggcaggaggtggccaagcgtgtgcactctggggatggcctagggcttgttaggggcaccctggcctggcaaagggtagaatagagcacacaaatccgaggctcacctccaaagcctactctttcttacacagccaggaattcacagagccagggctcaaacctcagccttctgatgccaaaaccagagtccttcccactttcccaggctgcctctggctgtcccctgtagccaacaatctgaggcagccagactccagggtgaaagaggagcttgggctctggagcctggatgggaccaatcgcaggaaatttctggaacttctttggttccaaggcagctgcagaagagccacctaccaggagaggaggttgtggagcccagggcagcccatgaggagccaggccattccacagcctctcaggcagggctctgagacagaagttcagggcaaaaagtgattcaaatgaaatgctggtgagaggtgaagccagctgggcttctgggtcaggtggggacttggagaacttttctgtctagctaaaggattgtaaacacaccaatcagcactctgtgtctagcttaaggtttgtaaatgcaccagtcagcactctgtaaaaatgcaccaatcagcactctgtgtctagcttaaggtttgtaaatgcaccaatcagcactctgtgtctagcttaaggtttgtaaatgcaccaatcagcactctgtaaaaacacaccaatcagcactctgtatctagctaaaggtttataaatgcaccaatcgtcctctgtaaaaatgcaccaatcagtgctctgtgtcaagctaaaggtttgtaaacgcaccaatcagcactctgtaaaaacggaccaatcagcactctgtaaaatggaccaatcggtgctctgtaaaatggaccaatcagcaggatgtgggtggggccaaataaggggataaaagttggccacaagaaccagcagcggcaacctgctcaggtacctttctatgctgtggaagctttgttcttttgttcttcacaataaatcttactgctgctcactctttgtgtccatgctaagtttatgagctgtaacactcacagggaagctctgtacctttggtcctgaagtcagcaaaaccatgaacccactgggaggaatgaacaattccagacctgccacttttaagagctgtgatgctcgctgcaaagatctacggcttcactcctgaagtcagcaagaccatgaatccaccagaagaaagaaactctggacatatctgaacatctgaaggaacaaactggatacaccatctttaagaactgtaacactcaccgcaagggtctgtggcttcattcttgaagtcaagaagggtaagaaccccctggaaggaaccaattctggacacactggggccaaagtgaagctgccgtcaagttttggttaacacccatctggggatgcagagctggtgaatgagttggcctgggctaaggagttgtggccctcgggacagccaggcctccaattccccctcagcctccacctacctcagatcctgccctcacttgtgcatgccctctgcatgtggagcccccagcatgtgcgtactctctgctatctggtaccagcagcattgggctagctgtgcaatggaaaattaacattacattcttacacacctaaagcctataggctgacactcagaggtcaatcacagtgtctaccccagtgggcagtgggttttatgctgggtgaccctgtccccctgccccctaccccacctgctgctgctaatcggtgcagacactggccaccaaggtataggcgggcaagcctgggataaactgagccagtcaaatttcctctttgaaaatctgaaccttccaggaagactgaaatgttttccagagggactgaagtgagaaaccagaatgtagaaagctgctcggctacaaactgtgaggaaaaagaaactttgagataaaaggtgtgaagtaaaagcagggattctcaaatgatagcaaatgtaagactcaccagatgtatttgttgaaaatgcagattctggggtcacacccttagaaaatctgattcagaagagtggccagggatgggtctaaacccccaggctgggagagtctgaggcaggggactcagcgaccacactttcatagccggcgggataggtcagggagccaggaacagcaggatgcttgacagcacctggtggcctgagtcccacgaaaccccatggtaaagtccttggagctcacaggcctcctccgtatgcatccacaatactcctccgctacagaagacagaaatgtatctctgggctttgcaaccacaaggggcctgccaggaccaggccacacttctccatgcacagtggctccagggaacgggatcttaagagcctcacttcccctgctggagtctgtgcgtagtgaagctgacagccttgggggcccgcacacctgcctctgaatcctaatccacagcttgcttctgagccctgctggccacgttaattcaccccctggagacttagtttctccttaaaataccaagtcaagaatgcccaccttataaacttatgagggcagttgagcttcgatatatactggctttctcccccaggcctatccagaagctattttcaaaatcagagacacggtttgggtaggcgcaaccgctccaatctgccccgcagggaagttgtagtgttagatgccgttgtcatccccaggagctacacaacacagaggcatcgatgcctgaagtggtgctttttctgtagaggctgggggtttaaagtgtgtgtgagtatgtgtgtgtatgtgttgtgtatgtgttttgtgtgtgtaaaatgacatgggaagaagagcacaggaatatcaagacaggatctataaccagttgctaaaacaggcttattttttcaaaatggaaatatctttattatattatcctattattaaagtaacacttgttcattgtaaaaaaaaaaaaaacatcaaacattacagaagtttatgtggtagaagggtcaagtttccacaaaatcttaacccaaagagaaaaccatggacagtggtttaaactatgtccctccaggtgctttttaaaatgcatatatatgaaaaaaattttaataaaacgcatatatgacttcttaaaacataaatggaaccatattatggtgtccatattctgcttttttctatttattgatcattcttcacattttaagtgcactccttctgccttgggtctccagcccttgttcctggagggaaaacagccagttcccaagaaagatgctgtgagcgactcaacagagactaccctgttgtctcacattatacaataaatacgtttttcttttcttttttttcttttttttttttctgagacggagtctcactctgtatcccaggctggagtgcagtggcacaatctcagctcactgcaacctccacctcccaggttcacgcgattctcctgcctcagcctcctgagtagcttggattacaggcatgtgtcattacacctggctaattttttgtatttttagtagagatgggggtttcaccatgttggcctggctggtcttgaactcctgacctcaagtgatccacccgcctcggcctcccaaggttctgggattacaggctcaagccaccacgcctggcacaatgtatatatatttcaataagtgctagaaaaggagagctcttagacactggagtgactgccctcattttaaagtctgcttctattaaagacatactgtctgcataacaaataattttactaagagggggactgcattaaagacgtagtgcaaaatgcaagtcaaacacaaagggataccatgttttacttgccaaattagccaaaatgttttattttaattatatgcttggtggtggtaagcaatatagctggctgtcttgtatgcctctgctgcacatattaattgggatatactttctagaaagtaatttggcaacattgtcaaaagcctgacaaatgttcgtaccgtctgatccattgttaagaatctaccccagtgaaatagctcaaaattctggcaaagagcaaggcacaagatgttcattataaatatttaataaaaaggggaaaataccaacagcctaaatatgcaacattaggagaaggatcaaagaatcatggtccattcaaagcattacatattacctgcccattccctgaccagtgatttttcagtctttgttcacatggggaagatcaaaatcaaatgttgcaattgagtagtgtgtctgttacttgtggaattacgtgggcaggttagggaagtcatgccatttacacaggcaatttggcggaggcctggaggtttccaagtgggaactgggggctgcaacctctgtggtctgttctgggttcaagtagagatgggtctcccttagcacctttgccttcttcacacaagggctaatctgccacccatgtctatcgacctcagagaactggaatctcctctgtcaatgggctcttcacatgtgcaacctcagagactgaacaatctgtctcctttattatttgcacaattatttgtcctaatttaaagtagtgttctacaatttagtgcgtagaaattttagaaaggacggggcaggggttgggaggaattagaaaagaaaatcacaaagctcccagggctacatcccaggttaaagatgaataggaagtaaaggagctcttgcgaggactgccactgtgcttcaggagcccaggaatctcaacctgaaaaattggctgcagattacttcagattcagctggcttcagattcaggtggctcaggcctgtaatcccagcacattgggaggccaaggctggagaatcacttgagcccaagagttcaagaccaccctgggtgacatagtgagacccctgtctctacaaaaaaaaattttttttttaaatagccaggcgtggtggtgctcagctgtggtcccagctactcgggaggctgaggtgggagcatcatttgagcccaggaggttgaggctgcagtgggctataatcatgccactatgctccagcctgggcaagagagcaaggccctgaaaaagaagaaaagaagagaaaggaaagaagggagagagagagagagaaagagagaagtgagggagggagggagggaggggagaagtctcagattctagagccctgtgagacgcccgcaaaacaaataaaaaccttttttagaggaagacaaggccgggcatgatggctcatgcctgtaatcccagcactttggaaggccagggtgggcagatcacttgaggtcaggagttcaagaccagcctggccaacatctctactaaaaatacaaaaattagccaggcatgatggcgcatgcctgtaattcccagctactcaggaggctgaggcaggaaaatcactttaacccaggagacagaggttgcagtgagccgagatcgcaccactccactccatcctgggcgacagagcaagactccatctcaaaaaaaaaaaaaagtcaactttatcccaggccttgaattattcccacacacacttttttcagacacaatatcctgcactcaaagataaccaagtacacaaggaaacaagacatcatgagtgaaaaccagtataaaaaatggacaaaagacagacatgaacagggactgtagctcctggcactgtcagacaggactctaaaacagctatgcctacttcaaagagggaaaagtcaaaacttgaaaaaatgggccatgtagcagagttgaaaaagaacctggtagaataaccaaatttactaagctgaaagtataacaaccagagtatctgaagctgccgccagcactggagcctgcccctccctggtctatgcagggaagctgacacccagccaaagctgaaatttatttctgtctcccactgaactatgtgagacatgccaccaccacccccttggtgaggtcagaaggttctgtttgcttctccgccattagctctggctccagaagttgttttgatatcaaaaatggcagcaattatggcaccatagggcaataactggtggcttgatcgaccctgatgtttgaggaagggtctgtcctatcaggaggctatttgctaaggcaaagaagagcgggatgaagtttaggaagatctacttcaaaatgttttcaaattttctttaaatggctcaactcctcaggaaatctcacctgtgaagcaagatgaagtctccctgaaggcttacttgagcccgttgtcagtgaaaccctgtctcttctgttgccatagtgacattccagcatgtgggtgagagtttcactggggatatttaaggacataatatatattttaacagactattgctcccattcctgagaataaatttccaagaactgaagtcccttccagaaattttggggctctctaggaaagacatcccttttaacctaataatttcactttaagaaactatcttaacaaataaaaaaacacatgattaagtttatactcaaacatcacaatgtcttacttattatggaagccacctaggtacccagcaatagggaatggctatgttaacagggacatagttgcttatgaactatttattatgcagtcatttagaaagaatataataaagacaagggaataacatgataaaacatcaagagtaggaagtgaatttgtgttcattaagattactcattagtttttaaaaaatatatttaggaaaaaaaggacctacaacaaaattatatttgtagtctgttagagtggtgatattatacgggtgatttttccttttcccattttgtaaatgttctatatttttagaatggtttattttaaatgttttgaaagaaacagatacaccctagctcacctcagcctaatttctgggttaatcatgagtacaggacagggtttaagattctggtgttagagactctgggttctcccatcactacagctgtgtgaaattaatcaggttcttccaccccttggagctctggtcagtcagccaacaaatatttattgagtacctgataaatgccagacacccaagtgctagggatacagccttaaataaaacagacaaagtcactgtcctcctgacgtttacaaatagggcggggagacagaagaaaacacacaaccacactgccatgtaaatatacagtgcgccaactggtggtaagtgttccgatttcctcccagagctggggtgagagttaaatgagataatacacctaaagcatcgagcacgtgctaggcacatcgtacatgctcataaacaaaggtcacgtagcagctttcctgccgctgctcaaaccccctgggaaaagagaggaggccagaacttcagcccctcagccctcctaagagcctgcagagctccccagatcccaactgcagctcccaagtgcaggcttgggaatagatgaagataaagagctctaaaatgtgcaacaatgccaggactagcctgccagggaggtctgtggggtggctgactttgatttcagggttgctgaccttttcttcattgagattggccagaacacagagcccagctgccaacagagtggcattgtagttctgagcctctggggccaagggtttggggctttacttccaggtctctgtggggaaatcatctgttccctatcaggaagctggcttcccaacccaacacaccatctccaaaccctgttttaatgcagccttgaatgtcacagggaagaccctgagtccctccaaggtctctgagacatgaatctgaatagggaagactaaaacataaattgagctcccatgagataccaagcatcaactctaacctgggccacatgaaaaccttaccgagtgtgtatggtcattcacctgctacaggtggaaatcacagtggcagtcagaatgtggcagagtggagattttaaactaggtctcatgacaatgatcctcctctttcagtctcccagctatgccacttagggttggaccccactctccctcccacaccccaaagctgattcatgacttctctaaactttttaagaaaaagagaaagtagtgacaacatggttgctttgcctaagaattcaacaaaaaagatgtagtaattcatcccaacatacccagcctggaggaaaatattgcatgacttataaaatccttccttaaacacattatctgtacctcttcttccatgtgcctggaattttctttaagatgttttttccccagaaggagagatacttactcattgcatgattaatctgtgccaagcactgaaggaggcatctttggtgaattacctcatttaaatccaattgccagatgagaatactaaggttcagacagcttggccctctcaaagctgtcatgtaagtagcagagccagtaatcacaccagtcaaagctcactctgttagaaggcctttctctttggttaccagctggccatgagaatgaacaattcatcccagcttacgtagactttccaggactttccagattttagcactgaaagtcccaggtcccaggaaactctttcgtcctgggcaaactgggatagtcggttacccgataggccattatcagaggctggaggagatgtcatgagatctgctgcttctcataccattttggtttgaatcaaagatttttcttcttggtatatccgacaatgaaccacagaatagtggcaacatgtcttatcctcatttctagattttctcaattctccttctcttccttctttttaacagcatctaaaacacaaacctcatcttgaagtctactggactctactcatgaagggaaagagtttgaaaattatacaggaatcaggccaggtgcagtggttcatggctgtaatctcagcactttgggaggccaaggtgggtggatcatctgaggtcaggagttcaagaccagccgggccaaaatggtgaaactccatctctactaaaaatacaaacattagccaggtgtgatggagcacgcctgtaatcccagctacttgggaggccgagggaggagaatcgcttgaaccagggagacggaggttgcagtgagccgagattgtgccattgcaatccagcctgggcaaaaagagcgggggaaaaaaaaagaaaaaattatacaggaatcattgtatattgaccccatatttctttctcagagaaagtagggtttctagtgaatagagggctgtcctagaagccagaaccccttacccagttctgcccgttaaatggctgtgtgcccttaggtaagactcttcccttctctgagccccagtttgaaatatgggagttctatatgatctcctgcccttgaggagtgcacaggccttaatgttcagccctctcattctacagatgaggacatgaaagctcagagaagtcaaggggcttggccaaggtcacacagcaagctagaatagtacagaaagacacacagcagtctctaaagttttctcttatgagacaaaatgttgccccatgtgccaccccccagcacacaccagagaaaaagcagagtacactaagaaacataatctgtttaatgttgctttctaagcctgtaaagaaaatgagccaaatgctgaaagattaagattccgatctttaaaaacaaatcagggtttaatttgggttttcttaaagcctcataaaaaagggaagctgaatccttgaccaaatactcagcattccaaagtgggacgatgagacagattttaattccctgcatgaggagcaggcagattggaggatgtgtatttccattggcctgcatatttttcagatgtgtaaatggcaggcagcctggagggaagagaatagccccaaaggggcacgaggggaaggtgacgccttggaggagggctgcttctgcaaagccataatgaaagctaactgggctgcatcctgatggctgagagagggcaagtaacttacttaaagtcattcagctagtaggtggcagagttaggaatttaacccagatctaagttcaagctcaagtgctcactggttatgctatgtaaaattgggagcgggaagaaaaatggcaaaatcaggacccctttccattatccagagagcctgctgtggactctctgcgatcccctctggatctctttcttgcttcagtcttacagggcacttcactgtttccttagaccccctgtactggatgaaaatgtattcattcagttgttcaacaaacgattaataagagtttactatgtgctggctgacactccccatcaagaaaagaaaccaatcaaactaaacagaaagatatgtccaggtcctgggattaaggagggattaaaaagggcttcctggaggaggcaatgtttgaagtgagccttgagttggatttgggcatatcagttgtgtccaaataaagcctggctgaatagttctttagtcattacttatttactagcagcctgggtcccctttggatatggagggctctgggtcagtaccattgaccaaagcaaacttagagattgtctaggaatgccagttatccccaaatattccagaccccaacgtatcaatctctcaactgtctctgcatctcgtctgtgtaatagctgcctccaccagcattgggaaggcaggggaaggaacacacatctacttagcaccgctacaccaactatttaaaaaaaatacaaggtctgtgtgggaaatattgtagcttcatgttacactgaagaaacagaagctgatagaacttaggtgacttgccaaaggtcacacagctctacagggcaacacagggatttgaatctaaagcccacactgttctcatggccctacctgcctttctgtgtgccagacagtgttagatgcttcaaaaacacaacctctgcaaaaaaaaaaaaaaaaaaaaaaaaaaaaaaaaggcccataaggacaccgaacaggaaatatggattctgcacctccagggtacttagaccatgctagacaccaaggattcacagaggcctaacctcaaagaaacactcactctattgaaaacacctaaatagcccactagaagccacagaggcccacatataaccaggagttgaactgggtggtgtcactgatgtcctgggttataggtaccaatgagggctggaggggtcagtgatcagagtcccagaggaagcgattttgtgctggtcaggaaggtcaggaaggatttggacagagggaggagagaaggaacccaggtagcagcagtcattctagctgggggaaacagtgctccaacattggctgggaccaggttctttctccctagctcagctctgctccctcgggatggtgccttctcagacctgatcctgcagttcagctaccgcaaccacatccttccaaattcgaatccagctgagccaggcacggtggctcacccctgtaatccaagaactttgggaggctgaggcaggtggatcatttgaggtcaggagttcgagaccagcctggccagcatggtgagaccccatctctactaaaaatacaaaaattaggcaggcgtagtaggtgcctgtaatcccagctacttgggaggccaaggcaggagaattgcttgaacccgggagatggaggctgcagtgagctgagattgcaccactgcactccagcctgggtgacagaggtgagactgtctcaataaataaataaataaataaataaatccagctgaaaagagcaagtatctgtgtccagcatttccagcacaagccctgagattcaccaccttaggtcacctgcccaccaaccaaccgatcagggagaatggaagctggggctgcactgtttagctttagactagattacagattctattcttgaagctgagcatgaactaactccacccagaggtccatggaccaaaagtcaggtggggatgttcccagaggaaaattagggtatggttaccaaagaaacagtacagatggaaatagatgccgtgcttgtagaactcagtaaatatccacttgttccattgcctgaagagaacccaaggcttacaatggttatagggcttgccccaaatctagagcagggagaagtgggctgaaaggttcagatcttctgttcaaacccagtgaaatagaatgtgtgtgtctgtgttgggagtgtaagatgaaaacaaaagctaagggttgtgttgggtgttaatagtgataaaggtgttcttggcaggatgcaactagattatggagagttttgcaagccagaaagaggttgaccttaatgaagaaggacgccaggcgcagtggctcatgcctgtaatcccagcactttgggaggctgaggcagatggatcacaaggtcaggagattgagactatcctggccaacacggtgaaaccccgtttctactaaaaatacaaaaaattagccaggcgtggtcacatgcacctgtagtcccagctactcgggaggctgaggcaggagaatcgcttgaatctgaaaggcagaggttgcagtgagccgagatcgtaccactgcactccagcctgggcaacggagtgagactctctctgaaaaaaaaaaagaaagaaagaaaagaaaggaaacagggaacttctatgggttttaatagagtaacaggatggaagctaaaactcactcaaggctgaagtcaaggggtctacactcttaaccattgagaccgacactcccttttaggcctccagggtactcccaagggatggactctgcaagatgtacccacccccatccccactgcctggctccagcttgtcctcccagatccggagtcccctcctccctcccaatgctgtggctttggcagccactttgcaaactgaaagttttaagtgcatttccaccccagaggaagctgagaagcaggcatgttgcagcagccacttctgagctcccaacatttatctttccccttcagaaaagggatcaaacactttttcacaatggaaagaggagagggtggagggagggagggaggaacacagaaaagagagcaaagagaaaaaaaggaggatgaataagagaattttatttgatctcatttgatcttaatcagacaaagtttatgtttcaattatgcatttttctcttccatgctgagacaatgaacacataagggaaaacaaatcaacaaatcacgttatttatttacttcccttgaatttactctgattccaaaaacatttaggaggctcacaaaactaaacacaatggtgactgtgattattagggacaaaaaggaacaaagaccataaaggtagcagagagagcagacaccagcagacacctgaagaatgccaatttccgacttggatgctatatttggccctatgtggaaaaaatgttcactttacattggttttgtcctctggtgacagaaagcattcgcatgcagctgtggccacaagcttttttttctgggactaaactcaagctgaaatatatcacatggggctgacaagttatatttgagttacagagaataacaagggcagtaagcccaaaggacttttcaaggaggcattgtcctgaatggcaatgaatgttctaaacagcatttttattgccaagaaaataaacacactggttaattgaatcctgtgttccttgagtaggaggatgtcaatctcatcccaggtctggaggagttaactgcagcagaatgggcagcctgggaggccctgagacccagaactagacctgcaaactcggctgaagcagatgctaggagaggagagggaccagagcgaggtgcctgctgtccctggccctttaagccagcccaaccagtaacacatcacatcgttggtggtcaaggcaattatcagcaccccttcctctctatgcactgatccttgcatgctttttcctgattttaagatcctgccaaaaggccaggcatggtggctcatgcctgcaatcccagcactttgggaggccaaggtgggcggatcacaaggtcaggagttcgagaccagcctgaccaacatggtgaaaccccatctgtactaaaaatacaataattagctgggtgtggtggcatgctcctgtagtcccagctactcgggaggttgaggcagaatcacttgaaccccagaggcagaggttacagtgagccgagattgcgctactgcactccagcctgggtgacagagtgagactccatctcaagaaaaaaaaagatcctgccattaccatacatgcccagctgtgacccccaagttcaactccaataaggatgaacacttatgggctgcctccccacatccactctctcctcccattagcaatgcccctgaatatcctttagaagcatacttgcctcattttcagccatgtggtgtgggtgggaatgacactacccccaagtctagggttgaatcctgtaacccaacctttaaccaagccacttatcacatttacctggcccttgtggttggtttcagggaagcgcaatgagccccccatcagggctaacacatctcaattctgggactttggtttgtgccatcaaggaagaggattttctttttctcctctggaaagaaaatgagaagaatgtacaccctagaactgctggcagtcaccttgtggccatgagggcacagccagtttgagaaagaagtgaacacagaggaaaccaaactgaaagatggaaagctggagtcttgtgaaaccatttgaaccaatgcaatgagccatgcttaaggccaggcttacccctggacttcccacttaacgtttttatttgggtccagttttcttcacttgacactgctagcatcctaccagataaggcaccttcgacccctctggagttaggttacctcgccctgccctgcaccgcatgttggcactttattacaggcactgctttagcccattcctctgtgcctttggtatttcctatcttctgagatgggaactcctcctcccatttcccactccagatggtgccagttgagccagccctggcctccaaggaaggttacaagtcattcaaacaccagatataaacaataagagaaagctggatcagcaggcaaagtgcagcaccccatcaatccaggcaatcctgcaaaggttctgccatcccaacccaccccgctgtcagggggctttggcagcagctgagagacatctcggggaagccagatggcactcagcatggctgctaatgtgtggcaagattcacagctctagactcctatctggggataggattcctaaccaggagaagaactggcagaagcaagcagagttctcaacttagagagactcgggccaattatttcatcaggcattcaggcgagaaagtgtccaaacaccagaatagggggccagtccaccctttgtatcagaaacacggcagaactccaatcacttcagtgaggccaaaatcagaacctgcttggaggccaagctgccttgaaactgggttcttctgaaggatatcctgacaggggacatcactgggcctgtggctgggagtccgggggcccacactatcctcctttccacatcatgcaggaaagccctgagggcagagaccatctgtgaaccaaaacccaccctctcttctttatcagatgtttgcttacaagttgcagtcaaagcagcaatgtgcccaatcctgttaaaagacaagcctcttccaccagcccccttcttcctgcttggaatgttaatgtaactataaatgcttagagctatggcagccaccttgcagtcctgaggacaaaggccaggagaaaagtaaagacttgacccagatcctgatattactgagctgttaaaccaagccagagactgctctcatctggactttttgttctatgaagtaatttatttttatgtatttacttcttttgagacaggatgtcactctgtcacccagggtggggtacagtggcacagtcatagctcactgcaaccttgaactcctgggctcaagtgatcctcctacctcagcctcccatgttgccagtactacaggcacttgccaccacacctggctgttttttgttttgttttgttttgtttttgtagagaccaagccttgctttattgcccaggctggtctcaaattcctggccttgagcaatcctcctgctttggcctcccaaagtgctgggattataggtgtgagccaccatacctggccttatgaggtaatttaatgttttagttgcttaagccagtggttctccaagtgtgtccccagacccacagcttcagcaccacttgggagagttagaaatgtacattctcaggccctgcccagaccaatagaacttgactctttaaagtgggaccctaaggcagaggttgcagtgagctgagatcacgccactgtacccaagcctggggaacaaagcaaggctctgtctcaaaaacaaaaaaacaaagcaaaaccaaaatgggaccctgaaaattgagttttaccaagtgcccccaagtaattctggcatgtgctaagtttgagaaccactagcttaaaccactattttatcagattttctgtgaggtgcagctgaaagcacctctaatttatacctttctccactgtatctctgaactgtttgtgagatatcaagaggctgagaacaaggcaggataagccaactgtcacaagcccaaatagcaatgtttcaaggagaaaatgaaactcacaaaggaaaagataaatgcaaattaagcacctctatccatgggaataatcataaatacaatcaaaaggcaaaatgaaagactggggaaataattgcaacaaatatgacaacatttaaaatcctttctttgttaaaaggccatgcaaaaccaaaaaggaaaaaacaagatctcagagaaaaagaacacacaaaaaaaattcagaataggaaatataaatggataataagaaaaatggccagcttgttagtaatcaaagcaatgtgaatttatttatttatttttttgagacagagtctcactctgtcgcctaggctgtagtgcagtggcatgatctcagctcactccaacctctgcctcccaggttcaagtgattctcctgcctcagcctcctgagtaactgggattacaggcacccaccaccacgcccagctaatttatgtatttttagtagaaacggggttttgctatgttggccagaatggtctccaactcctgacctcaagtgatccgcctgcctcggcctcccaaagtgctgggattactgcgcctggctggtttttacatgttttaaaggttggaagaataagaagggagaagaaggccaggcgcggtggctcatgcctgtaatcccagcactttaggaggccgaggcaggcagatcacgaggtcaggagatcgagaccatcctgcctaacacgatgaaaccccgtctctactaaaaatacaaaaaattagctgggcgtggtggtgggcgcctgtagtcccagctactcaggaggctgaggcaggagaatggcatgaacccgggaagctgagcttgcagtgagttgagattgcaccactgcactccagcctgggcgacagagtgagactccgtctcaaaaagaaaaaaaaaaaaaaaagaagggaggaggaagaaaaggaataagggggaagaaatggaggaagaagacaaaggaggttgaggaaaaggagtagggagaggagggggagacattcactgcagtggcagagaccgtatttggcacagcctaaaatattttctatctgccttttactgaaaaaatctgccagtcctggactgcttctaatctaaagcagggtcaggaaactacggccccaaatctaaccagccacccgtttttgtgaatgaagttttattggaactcaccacatgcgtttgtttacagagtttagagctgcttttgtgcttccatggcagagttgagaagtgtgacagagactgtgtggcccactaaacagaaatattccttatctggctctttacaaaacatttcccaacccctggtctaataaataatcagaaagaaaataaaaatgcttgcacaaagatgtttattattacattatttatctagaaggccagttaaacaaatgataggatgacattaaattgatataatgaacatgagttaccccagcacctcaaatcctaaggattcaataaacatttttaattattattgcctatggaatagtcattttctcatttttcaaagacccagtaataaaacaggaaggcaggatatagtgtagcagatacaagaggctatgtgcttcttttgtagaaaggagcaatgtctgtttttattttctattatttcaattatgttttaagacatagatatgcaagataaaagaaggtaaaggaatgaatcagaatctcggctgttctccctgggctaaggggttctggataattttcattcttctctcatatgctttttagtaatttccaagtttcctgcaatggaggattattgctcctattatcattaaagttaaaattctttcttctcatacagtaattgagttcagaaatacagctgagggccaggggcaggctttgggagttgttgctacagaagcttagcatgaaggaaagggccaaaggcaggaaggaaacgcagaacgaggagccagggtgggcgggaggtggccaccatgcacagccaagcagcctgtggcaaaccccaggggccacagcgctttgaaggacaaggagatctggccttgcttcccaaagtgcggcccccaaaccagcagcacacgcacctcttgggagctgatcagaaattagactctcaggccccaccccagatccactgaatcagagcctgcattgtaaaggatcccaggtgatatgtgggcacactccagtttgagaagcatgggctgctctggaaccctgtggcactgttaaccctcctgcagccatggccctccacccacgatctttttcagtaacagccgctacactggaaatgcattccaagagagacctgtgactccctggcaagaaaaaaaggatggctgggtgcggtggctcatgcctgtaatcccggcactttgggaggctgaggtgggtggatcacctgaggtcaggagttcaagaccagcctggccaacatggtgaaaccctgtctactaaaaatacaaaaattagccaggcatggtggtgggtgcctgtaacccaagctactagggaagctgaggcaagagaatcacttgaatccgggagacagaggttgcagtgagccgagataacactactgcattctagcctgggggacagggtgagactctgtctccaaaaaaaaaaaacaaacaaacacacacacacacacacacacacacaagacaaaagggggccttaaaaggaaaaacagaaagatagatgggtaagccactgccaccacctttgcacccctgtgctcacggcacacacacacacagagccaggtgtgtgtgaacatgaggttggaaaacactcaaaaggcagcaggcagcctttccagaggccctgagaggcctgtcccccactgtggagtacctactgtcctcaggtagagacagagactgtgtgctgcaacagggggagtgtcccaaggcgacctatttacccaattcctggaagagattttatttcttgttaaaatatcctggctaggcatagtggctcatgcctgtaatcccagcactttgggatgccgaggtatgaggtttgcttgaatccaggagtttaagacctgcctaggcaacctggtaagatcccatctctattaaaaaaaaaaaaaaaaaactttaaaaatagcccagcgtgatggcatgaaactgtagtcccagctacttgggagactgacatgggaggatcccttgagctcaggagctggaggctgcagtgagctatgattgcaccactgcgctccagcctgggcaacagagcgagaccctgtctttaatatatatatactgaagaaccaccagacgctagttgagaggggcacagaggtggagaaccatgagcctgactgggcccgggggctttggcttgcatggtctccaccagccttctgagctgtcaccgaagcaggtaactgcagcccctccatgtgctgcatgtgccttgtcatgtgccagtgctgcatgtgccttgtcaccctgcatctgcacagcaaccctttggggtgggcaccatggctcatcccatttgataggcgtggaaactggggctcagagaggttgagcagcttatcaagggagaggcagagccaggcgtcattgtgaagaatgtgacccccaaggccgagtgtcttcctggacaccaggctgtcttccagaagcatcacctttgattctcactgtcatgccaaagaggctgctgagtgatctcatcagattcgagcagctctgctcagagatgtccagctgtccacggcctgccctgggtcaggagcaataagcatacttgatcaaacaagaagtcctgcttcctgccccagcagcaaggggcctgcccagggcccatgcagctactcggatgcagtggctctccaattccaaccaggtgggctccaggactaagtgaaatgaacccatcgcaaaagggcaaatattgtacaattccacttataggaggtgctggcatggtcaaattcatagagacagaaagcagaacagtggttaccaagggctgaaggaagagaggaatgagagcaatgggtgcagagtttctgtttgggatgatgaacattctggaggtagatggtagtagtgtttgcacagcaatgtgagtgtacttaatgcccctgaactacacttaaatatggtcaaaatggtcagttttatgttatgtgtgaatatattttgagactgagttttgctctgtcacctaggctggctcactgcagcctcaaactcctgggttcaagggatcctccccctcagcctcccaagtagctgggactacagatgtctgccaccacacccagccaatttttttattttttgtagagatggggtctcactctgttgcccaggttggtctccaactcttgtacaactcaagcgatcttcccactttggcctcccaaagtgctgggattacaggcataagccaccacaccaggcctattttgtgcattttaacacaattgttaaagtggtaaattttatgttatgtatattttatcacaatttaaggaaaaaaaaaagcaggagagaagggaaaagaaagagagactcttaggccctgggaagaggaaacaggaatatttattgagcacctactggatgctaagctctgtgctgggctcttcacatgtgttctcaaaataacccttgaagtaggaactgttagcaaactgagtgaggtttagaaagtggcttgtccagcatcatgaagccagacagtggtagacagggactcatacctaggtctgcggcctcaaggacactagctcagcccacagccatccaaacaccatcagagagaggacatgttgggaaggcctggtcctccatcactcattcattcagggtcaccaagcaacactgcaggactggacagaggtggcggtaaaggggttcacagtccctgacaactgcgccagctggagagtgtgggggcccacagagcaaatccctgtgtcacttctcaccctcagaaccttggcctgaggtacattctgcctttggcaccgcccagcctaacttcctctgagcagggagctgcagcaagctgaggtgaagggagttagggctagggtcagggtgagacccgaatttaactttgaacatcccagaaatggctcgctcccagacattgcacaaaagcacagtgacacaggttcaaatcctgtcctgggcttggcagcaacttggtagaatagaaaatgcaggggctttggagtcagatgggcttgggttgaaattcatactctgccacttgctgtatgatctaggctgggcctcaactgagcctgttttctcatgtgtcgaaggggcgtggtaataccttctttaccactgtcatcccatgtggactttagagccaaactacctgtttccccaccatttatttgccatgtgaacttgaataagttacttaacccctctgtgcctcagctttcctcatctgtaaaattgggatagttattaccttgatgggtttttgtaaggattaaatgagttaatacaggtaacatgccaagcacagtgcttggcacaaaagaaagtatgtacatatatgcgctttatgtgtatgtgtgtgtgtgtgtgtatatatatatatatatatatatatatatatatatatatatatatgctattatgaaacatatataagcccctggcacatagtaggggactcacaaagcatacttcccccttcctttcctgcctcctgtttcctcctgtatgaggctcagagaagctgttaatggtgtttgtcctggattttttcctaaatatccaggttggacacagccagtgctggcaggagccccttgcctttcctgcccttcccctctcccagatatcaacaggtgcttccgaggaatgagaaggaagcctatcgagccacattctccagaaaagaggcgcagcacagtcgctccaaaaatgtgcagcctctcagctgcctgtgccaaacccaccccatctgtcctcagcctgtgttcccaggtcccaaggcagtcctgagagacctcagagcactggaggagactccaaccttgcctctgggcagacacgagctgacacaatagggagagacccttactccaaatgagcattacttgatcatctccagccactgtgcacgagcagtatttactttctccattttacaagacacaaaagcacagagaggttaagacaattggccaaagttaaccagcaagccaatgcaaaggtaaaaagttaaatcatggcctttctaggctggctgcagtgactcatgcctgtaatcccagcactttgggaggccaaggcaggcggatcacttgaggtcaggagtttgagaccagcctggccaacatggcaaaaccctgtctctactaaaaattcagaaaagtagttggacgtggtggttcacgcctgtaatctcagttactcaggaggctgagtcatgagaattgcttgaaccagggaggcaaaggttgcaatgaggtaagattgtgtcactgcattccagcctggagcaagactctgtctcaaaaacaacaatcatggtctttcttgatcccaaacccagcagctggccattatcacattctccccctcactgctgaaccacatcaccatcagctctgttactcactggtcacaggaacttgtgtgagtcccttcacctctctgaacctccacatccacagttgtaaaataggcaaactactgtaccaggctgtttgttcattcgacagtcattgactgaacccagagccatacttacggtgaaactattaaagcttcctgttcagggcctctccttcacacagggaagggcctagtaagcatctcacttttcttaaaaaaagttcccagccccacaaaacctgggcctgcccctgctaactgtggtgtgtcagcatcatgccaagctctggatgtaggacaagataggaacaaaacggccaggggagttccccggcctggtgcggtggctcacacctgtaatcccagcatgctgggaggccaagatgagaggatcccttgagtccaggagtttgagaccagccttggcaacatggcaaaaccttatctctacaaaaaacacaaaagttagccgggcatggtggcacatgcctatagtcccagttacacaggaagctgagatgggaggatcactcgagcccaggaggtcgaggctgcagtgagccatgatcacaccactgcactccaacctgggtgagagagtgagaccttgtctcaggggaaaaaaacagaatccctgcatagggcttgactcttgactcacagtaggtgctgaataaatggtagctggcattattacttattgtctctctctttcccattaaaatgcaagctccccaaggatagggaactttttcaattttgttccttgctgtagcccaagagtttagaacagttcctggcatgtggtaaaagcccagaagatattttccgacccttgagatggttttgttcaactcttcaattcacaggtgaggaaactggcccagacaggtgtgtctttcccccagtctcactgtgctgaacagggccaggccccagggcccctcaagccctgaagaaggttttcttctacttcctgctgcctcctttgatgattcacactagggcccaagagatacttctggaataaaaaatcaaggggtcaagctgggtgcagtggctcatgcctgtaatcccagtactttcggaggccgaggtgggtggatcacctgaggtcaggagtttgagaccagcctgaccaacatggtgaaacacccatctctacaaaaatacaaaaattagctgggcgtgatggtgggcacctgtaatcccagctactcgggaggctgaggcaggagaatcacttgaatccgggaggcagaggttgcagtgagccaagatcatgctactgcattgcagcctgggcaatagggcaagaccccatctcgaaaaaaaaaaaagaaaaagaaaaaaaatcaagggaaggctgggcacaacagctcatgcctgtaatcccagaactttggaaggctgaggtgagaggatcacttgagcccaggaactcaagaccagcctgggcaacatagcaagaccccgtctctactaaatatacaaaaattacccaggcatagtggtgtgcacccatagtcccagctactcaggaggctgaggtgggaagatcacttgagcctgggaggaagaggttgcagtgagctgaggtcacgccactgcactccagcctgagtgacagagtgagacactatctcaaaaaaaaaaaaaaaaaaaaaaaaaaaggccaggtacagtggctcacgtctgtaatcccagcactttgggaagccaaggtgggcagatcacttgaggtcaggagttcgagaccagcctggccaacatggtgaaaccctgtctctaccaaaaataaaaataaaaaaattatctgggcgtagtggtatgcgcctgcaatcccagctacttgggaggctgaggcactagactcacttgagcctgggaagtcaaggttgcagtgaatcgagattgcaccactgcactccagcctgggtgacagagcaagactctgtcttgaaaaaaaaagaacagcaaggaaattggtagagtgtagaccttgcagtgaggttgccagacttaacaacaacaatacaggaccacaggttaattttaaaatttagataaacaaaaaataatatttttctattagtgtatcccatgcaatcttgggggcatagttataataaaacactattcattgcttatctgaaattcaaacttaactgagcatcttatatatctgctggaaactctgcctcagatttccactgaaattagttcaaattcctgctccactacttactgtgtaatcttcgacaagtatcctaaccactcactctgccagagtctgaatgttttcaaaattcatatgttaaaaacctaatcaccaatgtgatggtattaggagatggggcttttggaaagggattagatcatgagagcagaggccttatgattgggattagtgccctataaaagagaccccagagagctccctgactccttccaccatgtagggacacagtgaggaggcaccatctatgaaccaggacagaagtccttaccagacaccaaatctgctggtgctttgatcttggacttcccagcccccagaactgtaagaaagaaatctctgttgcttataagctaccccatctatggtattttattacagcagctcaaatggactaagacacactgtaatcctcagttttctcatctgcaaattaaggatagccccaccttcttcacagagtggctgtaaggattagagatgataccttaagtattggacacacagcagacagacactcccaatgttggtttccctccctggtttcagaagcccttaggggactcgggagggagcatgacttgccatttgtaggataatatggtaactacggtgttcaagttcttccaaacagcattctagtatatagaatagaatattgtgagtgctgccttaaggcaaacttctcatcccttcaaacccaaactcccttttcataagcttttttttttttttttttttttttgagacagtgtctcactctgttgccaaggctggagtgcagtggtacaatctcggctcactgcagcctggccttcccaggctcaaagcagctttccacctcagcctcctgagtagctgggattataggcacctaccaccccaccaccacacctggctaattttttgtgtttttagtggagacagggtttcaccgtgttaaccaggctgtattcaaactcccggcctcaagcgatctgcccacctcggcctcccaagatgctgggattataggcatgagccaccacgcctgccttcataagcattttaaatgcctctttgactttatttaaatgcagtaataaactatttatatgacaacacaaaagaattaatataatgatatacctgcaacttaaatgaaaaataaaagggataaagtaacatttcaacacataaatacttgggcacgtcgtagtgtgatacttgcatggaataagaagaaatacatttagattcagaagttagacaatattcaatattaagttgaactctatgaaatttccaatatggaactttgatctacaaaaatggtaatttcatgattcaacctaatacctgatattcaaaaatacaagcaaatggggtggggggtatcttttcctctactcacaaactaaactacctgtcatgtacatgtgtgttgcaccatgaatcaatagctacaaatgcaggtaggtataaatgtatcagcaactcaaatatcgtgtcattaccatgcaggttgcgattttccaaaatggtgacatgctcttgttaacattgcacacaatgcaaagtataatctttcccttttttcccagtatttgcacttttgaaaaattgtttatatttgaaaaaattcaaaaacatgacattgctttatatataaaacagcattcatttctgggatcagcaaattataaacaggttttggggtgttttctttgtttgtctgttttgttttgttttattgggggtttttttcctatatgaatttcttccaggacattcagaagttcagaggaggcaggaaagcttcttgttgcctgggtctgtaccatattgcacacgctacaggacttgccctcttaaatggaagtagttgactgcaaaatcattatgacaaccaaaaataatccccctagttccaaaaccaccactaaagagatgatatatccccattgagaaccaccaatctaataacttctgcctgaatgctttcagtgataagaaattgactctacaataccatctcattgactcacctgtcaggaagtaataattccttcttctatctctggtgggtacccaagttgggccccatctctgtactatggtcaccatggagcctctaccaaagaagctgctttctagacctttccattgtgactcacgctccagactccactgggggaaaaagacagatgtgggaagctctgcccagtcaggatgaggctggggaataatctattatgctcttcttgccccatcttgtagtgggttagtgaaaagagggagctacaaaacagcatatatgagattctttcattattataaaaatgcatatgagtgtgtgtgtgtgtgtgtgtgtgtgtgtgcagaaggaaagaccacctgctcagtggttaggaactcagacagacctgggctcaacacccagatctgccacttattaaatggtaaaccttattaagtggttgggaaaacaaccatcctgagacttagtttctctgtctataaggtgggaataataagggcacctacttcataggaataaattaagataacacatgtggggcacttagcagaatgcttggtgcccaacaaatgttggcttacgtgactttgcaatgatagtggatgaaacaatacatttttccagggaaaacccatatatgcacccaaggtgcaaaatgagccccatgacccctttggcctcaccaggatggctgagcacaaaatgagattaaatccctctgatgaccttgtgcagtggcaagccagactgtacccttcaatctggggaccaccacacggaagaggtctgcagagaaaaggccccataggcaagacatagcacaggttcagcccatacttgtgcgaaagacccagagcttattcaggcagcattttggtagaacaaagagaaatgcaagattattggagaccataaaacaaaaaaaaatagggagaagataatcagccaagcaacccacactggaaaagtcaggggacagaaaattaaatgaagcagggttttatcgtacatacttgagcaggtcttctgaaatttagctgcaaaatgtacctgttcatccttcatagtcctgctgtctgaggtctccatcctcacaaacaaaccagccctcagtgggttagctgcctgctgagctggagtatacttgggaaaaggttcccaaatgtcttcacacaaggaataagatgaaaaaactcctgtcgatgttttatggaatatttttacattttactagcattcatcagtcttttactattgacaaacatatcccttatatcctatttcaggattttgaatttttaggcattaaatttggtaaatactatatgttcattttctcaagatattttatttacatgtttttgttttccagttttcacaagagtttctttaaattcttactagaatttctttaaacttccaagctgctatatctgttaaaaattaattgtatttgttcatttggattttatctcttatgttttagagagccagcataaacacacagaacttttattctcatcaatgtcctctttttttttttttttctttttgtaagagatgaagtcttgctttgtcaccctggctggagtacagtgcacaaccatagttcactgaagtcttggacttctgggctcaagtgatccttctacctcagcctcttgaggagctgggactataggtgtgaggcaccacacccagctaaagtgagaccccatcttttttctttaaaagtaccactccaggggctcccaggagcaagatctagggttgcacacaaggccccactctgcactcattcctcgcctcagcctcccaagtagctgggattacagatgggagccacggagcccagcgtcaatgtcctttataagtcagcattacaagttattgattgatatcattcataatctcttggtcagaacttgccacatcagtactggcaattaggataacttcctatatgaatgaggctattccatgccttcttttttcatctgactctgattctaattatactgtgagctctgagaaaacattcttacttggttacaatttgtattccttcaactaatcacccacttacttaagtacagattctagcctgtacttagataaatattcactggttgtccatggtcaacagtttcctgattgccacagttccctggttcaagtatcacaagcttactttaacagacatcagctgggcgcagtggctcactcctgtaatcccagcactttgggaggtgaggcaggcggatcacgaggtcaggagtttgagacaaacctggccaacacggtgaaaccctgtctctactaaaaatacaaaaagtagccaggcacggtggcgggtgcttgtaattccagctactcaggaagctgaggcaggagcattgcttgaactcaggaagcagaggttgcagtgagctgagatcatgccactgcactccagcctgggtgacagagcaagactctgtcttggggaaaaaaaaaagagagacatcgtatgaccagtggattcatttgcccatgggtcacacgacattaatgaaatgcagctgttgtcaatgaaatgcagcttcattacacttacaattcataatatctagcagactgaaaagtctgtatcagtaatgatttgtcaatatgttgccatgttacaattaatcaaaacttgccaggcacagtggctcaagctgtaatcccagcactttgggaggctgaggcaggcagatcacttgagcccaggagttcaagaccagactgggcaacatgacaaaaccctgtctctacaaaaaatacaaaaagtacaaaaaattagccaggcatggtggcacatgccaccatgtcccagctacctgagaggctgaggtgggaggatcacctgagcccggtggttgaggtaacagtgagccatgattacaccattgcaccccagcctgggtgccagagtgagaccctgtctcacaatattaataataataataataacttacaattatagtcaaaataattttataaatgagaaggaaagctccggctatatgcaaatgctaagttaggtgaatggattatacattgatatagcctagtggtgactgaaatcttgattctcaaagattttaaggactagatatgaactgaagtcttccaccagccttcttaccttttcagaatgtgtctttggggggtgatggtattatttattaagcaatggttttggtttttttttttctttttttgagatggagtctcactgtgtcacccaggctggagtacagtggcgcaatctcagtgagaagtgaagccagctggatttcctaggtcgagtgggtacttggagaacttttctgtctaactagaggattgtaaatgcaccaatcagtgctctgtgtctaggtaaaagtttgtaaatgcactaatcagcactctgtaaaaatgcaccaatcagctctctgtgtctagctaaaggtttgtaaacacaccaatcagcactctgtaaaaaacgcaccaatcagcactctgtgtctagctaaaggtttgtaaacgcaccaatcagcactctggaaaaatgcagcaatcagcacagcactctgtaaaatggaccaatcagcgctctgtaaaatagaccaatcagcaggacatgggtggggccaaataagggaataaaagctggccaccggagccagcagaggcaacccggtcaggtccccttccatgctgtggaagatttgttctttcactcttcacaataattcttgctgctgctcactctttgggttcgcactacctttatgagctgtaacactcactgcgaaggtctgcagcttcactcctaaagtcagtgagaccactaacccaccagaaggaagaaacaactccagacatgccacctttaagagctgtaacactgcaaaggtctgcggcttcactcctgaagtcaagcgagaccatgaacccaccagaaggaagaaactccagacccatctgaacatctgaaggaacaaactccggacacaccacttttaaaaactgtaacactcaccgtgagggtcctcagcttcattcttgaagtcagcaagaccaataacccaccggaaggaaccaattctggacacattttggcaaccatgaagggattatcgcctatcgccaaggggtgagtaccatcagaccctattcatttgctattctgtcctatttttccttagaattcaggggttaaataccgggcacctgttggccagttaaaagcaaccagcatggctgccagactgaagacacgggtgtctggctttctgggaaagggctctctaacaacccccgactcttcagagttgggagcattggtttgcctggaaccagctttcacatttcctgtacttctgggctgagccaagggttgacagagaggaaagcccttcagctccggggtcctgataacaagttggttgaccctgaggccatgagcggaactctcagtcatgtcacccaagtgacacttgcccatctatcctatctatcctgatgcttgcctcctgggtcctaattcctgtcagacaaacttcctctctcctcttctctcaggctagtcctgcttctaaaaaccactccctgtctctggtgcttttctagtttctcctgtaagtatgatttctagtataaacttcaggactctgttaccttctttaggaacccgggctcaccaataagaaagacataatttttgccctaagccccatcataggggggataatctggaattttaggatccctcctcagacaagcaggcctaataaaagctattcctgaagctaagatatggggagcctcagaaattgtatcattcctattcatacaagtgaggacaaaaggcatgactcttccaactctggagatcccttctctccctcagagtgtggccctccacttcatttttggggcataacatctacataggacacaaataaagtctcaacactaacaggaaaacaggactgtaacaggttttcaagaatgtgttggtaaggtccactaaatctgatttttttcgttcctctttgtggtctaggaggacaggcaagggtgcaggtttttgaggatgtgtcagtaagaaccactaaattcaaccttcctcagtcctccttgtggtctaggaggtcaggcaagggtgcaggttttcaaggatgtgtcagtaagggtcactaaatctgaccttcctcagtcctccttgtggtctaggaggaaaactagtgtttctgctgctgtgttggtgagcacaactattccgatcagcagtgtctggggaccattgcagattcttgggcaaaaggtatttctgctgctgtgttggcgagcatgactattctgatcagcagggtcctgggactgttgtgggttcttgggcagggggagaaacaaacaaaccaaaactgtgggcggttttgtctttcagatgggaaacactcaggcatcaacaggctcacccttgaaatgcattgtaagccattggtaccaatttgacccacaaaccctgaaaaagaggcagctcatttttttccgcactatggcttggccccaatattctctttctgatgggaaaaaatggccacctgagggaagtttaaattacaatactatcctgcagcttgatattttctgtaagagggaaggcaaatggagtgaaataccttatgtccaagatttcttttcattgaaggagaatacacaactattcaaagcttgcagtttacatcccacaggaggacctctcagcttacccccatatcctagcttccctatagctccccttcctattagtgataagcctcctctaatctcccctgctcagaagcaaataagcaaagaaacctccaaaggaccacaaaaacccctgggctatttgatatgcccccttcaagctgtagggggaggggaatttggcccaacccgggtacatatccccttctccctctctgatttaaagcagatcaaggtagacctggggaagttttcagatgatcctgataggtacatagatgtcctacagggtctagggcaaaccttcaatctcacttggagagatgtcatgctattgttagatcaaaccctggtctttaatgaaagaatgcagctttagctgcagcccaagggtttggagctacctggtatcttagtcaagtaaatgatagaatgacagccaaagaaagggacaaattccctactggtcagcaagccaaccccagtatggatccccactgggatctttactcagattatggggactggagtcgcaaacatctgttgacctgtgttctagaaggactaaggagaattaggcaaaagcccatgaatttttcaatgatgtctatcataactcagggaaaggaagaaaatccttccgctttcctcaagcagctacaggaggccttaagaaaatatactcccctgtcacccaacccactcaagggtcagttgattctaaaagataagtttgttacccaattagccacagatatcagaagaaagctccaaaagtgagccctggacctgaacaaaatctggaggcattattaaacctggcaacattggtgttctataatagggaccaagaggaacaggcccaaaaggaaaaccaagatcagagaaaggccgcagccttagtcatggccctcagacaaacaaaccttggtggttcagagaggacagaaaatggagcaggccaatcacccagtggggcttgatatcagtgtggtttacaaggacaccttaaaaaagattgtccaacaagaaacaagctgccccttcacccatgtccactatgctgagggaatcactggaaggcacactgccccagaggatgaaggttctctggcccagaagcccccaatcagatgattcaacaacaggactgagggtgcccggggcaagcgccagctcatgtcatcaccctcactgagccccgggtacgtttaaccattcagggccaggaaattgacttcctcctggacactggcatggccttctcagtgttaatctcttgttctggacaactgtcctcaaggtccgttaccatccaaggaatcctgagacagtctgtaaccaggtatttctctcacctcctcagttgtaattgggagattttgctcttttcacatgcctttcttgtcatgcctgaaagtcccacaccgttattagggagagatatgttagccaaagctggagctattatctacatgaatatggggaagaatttacccatgtgttgtcctgtacttgaggagggaatcaaccctggagtctgtgcattggtaggacaatttggaagggcaaaaaatgcctgcccagtccaaatcaggctaaaagaccccaccacttttccttatcaaaggcaatatcccttaaggcctgaagctcataaaggattacagggtattgtttaaacatttaaaagctcaaggcttagtaaggaaatgcagctgtccctgcaacaccccaattctaggagtgcaaaaattgaatggtcagtagagactagtgcaagatcttagactcatcaatgaggcagtaattcctctatacccagttatacccaacccctgtaccctgctctctcaaataccagaggaaggagaatgattcactgttctagacctcaaggatgtcttcttctgtattcccctgcactctgactcccagtttctctttgcctttgaggatcccacagaccacacatcccaacttatgtggacagtcttgccccaagggtttagggatagccctcatctgtttggtcaggccatggcccaagatctagaccacttctcaagtccaggcactctggttcttcagtatgtggatgatttacttttggctaccagtttggaagcctcatgtcagcaggctactctagatctcttgaactttctagctaatcaagggtacaaggcatctaggtcgaaggctcagctttacctacagcaggtcaaatatctaggcctaatcttatccagagggaccagggccctcagcaaggaatgaatacagcctatactggcttatccttgccctaagatgttaaaacagttatgggggatccttggaatcaccggcttttgctgactatggatccccagatatggcgagatagccaggcccctctatactctaatcaaggagacccagagggcaaatactcatctagtagaatgggaaccaggggcagaaacagccttcaaaaccttaaagcaagctccagtgcaagctccagctttaagccttcccacaggagaaaacttctctttaaacgtcacagagagagtagggatagctcttggggtccttactcagactcatgggacaaccccacaaccagtggcacacctaagtgaggaaatcgatgtagtagcaaaaggctggcctcactgtttatgggtagttgtggcagtggccatcttagtgtcagaggctatcaaaataatacaaggaaaggatctcactgtctggactacttgtgatgtaagtggcatactaggtgccaaaggaagtttatggttatcagacaactgtctacttagataccagctgctactccttgagagactagtgcttcaaatgcatacatgcgtggccttcaaccctgccacttttctcccagaggatgagaaaccaatcgagcatgactgccaacaaattatagtccagacttatgccacctgagatgatcacttagaagtccccttagctaatcctgaccttaacctatataccgatggaagttcatttgtggagaatgggatacaaagggcagattatgccagttagtgatgtaaccatacttgaaagtaagcgtcttctcccagggaccagcgaccaattagcagaactagtgcacttacccgagccttagaactgggaaagagaaaaagaataaatgtgtatacagatagcaagtatgcttatcaaatgttacatgcccatgctgcaatatggaaagaaagggagttcctaacctctgggggaacccccattaaataccacaaggaaattattgagttattgcacacagtgcaaaaacccaaggaggtggcagtcttacactgccaaagccatcagaaaggtgaaggacaaaaggcagaaggaaactgtcaggcagatgctgaggccaaaattgctgtcaggtagaacctcccactagaaataccagtggaagaacccttggtatggaacaaccccctccaagagattaagccccagtattccccaactgaaacagaatggggactttcatgggggcatagttttttcccctcagggtggttaatgacagaagaaggaaagatacttatacctgaagccagccagtggaaaatacttaaaacgctccaccaaatttttcatatgggtattgaaaacactcatcaaatggccaaatccctgtttacagggccaaatctccagaccatccgacaggtagtcaaagcctgtgaggtgtgccaaaggaataatcccttggtccatcgtaaggcccctttgggggaacaaagaataggtcactatcctggaaaggactggcagttagacttcacccatatgcctaagtcaaagggatttcaattcttgttggtctgtgttgatacctttacaaattggatagaagctttcccctgcaagccagagaagtctcaggaagtgattaaagtcctaattcatgaaatgattcctagatttgggctttcccaaagcttacagagtgacaatggtccagcttttaaaatcacaataactcagggaatttccagggcaccagggatacaatatcacctttactgcacctggaggccacaatcctcagggaaggtggagaaggcaaatgaaacactcaaaaggcacttaaggaaactaacacaagaaactcatctcccatggcctactcttttgcccatggccttgttgagaatccgaaattctcctcacaaaatggggctcagtccatatgaaatgttgtatggatgaacttttctcacaaatgacctcctacttgatcaggaattggccaacttggtcaaagatataacttctttggcaaaatttcaacaaaaccttaaaaaactacctaaaggatgtcacagaaaaaagggaacagagtagagttgtttcaaccaggagatctagtgttggtcaaatctctcctctctacctcctcatctatgcactctttgtgggaaggaccatactcggtaatcctctctacccccactgcagttaaggtggcaggggtggaatcttggattcaccacacctgagttacattttggacaccccttgaggaacctgcgggaccatcagatcaggagtcccaagatcagccagaccagcctcgatacacctgcgaaccattggaggactttcatctcctatttcagaaggaaacatcccagactaaaaaggctcctaccactgatcctgaagaaacaccccttcctacttaaaaaagataagtgaaggcctacataatctttatctttaacatctctccttgcccctttaatggaatccttttactatttcatcatattattaagcagcatactaaccatactctttgcaataggattatactgtagctcctgccaggatgaaaatcctaatcacatcaaccttctttctttctatcttccttccttctgacagcaatttactcctacctttaactcagactgaataaaatgatctcatcttccagagcaccctctttaccttccaatttactctttgcctgtctattcctcctgcttccttggatacctcatacaatcacccctccccttccactagctcctaattacctctataagactctcaacttaacccactctctgttaaactagtccaatcctcccctgacaaatgactgttggctttgtatctctctatcaacttctgcttatgttgccactcccattcctgcaaaaaactgggtctttaccaacttaacctaccaccctcgttatgaaggaaaagaccctttccgaattctaaatatgcaatcattagccaacttccccatctctgataggaccaagaataccctaacaggacatgcaatccaacttttacattcttacatttccaacctcacttattacacaagcaatgaaaagcccatacatggccctgtaactacgaatactatcttaactttccaagcccctttatgcatccaacgcaacatgttatcaggcctgcccctggggcacctactaccccatcagtgtaattacatcctacaacttcaagccccaactgatcatagtaacttccgagtcacccaaacagctccattcagatggcttgtccacttctcagggcccccaaaaatcatcacctcctccctacttaacaaacagtccaggttgtaatggcaaacatgctccctgcatgaccattcacccctggaccccctgcagcagcacccccaccactagtgaatgccttctcatcccctctttcaatcactctcaaatggttcctagtagatacaaaatggttttgtctccaatgggaaaatagaacacagggagccactcagtttgctcccaacacccgtttccagccactcaccagagctaccttgacaagtactctgggagtatgggaaaatgaaaacaataaactcacacacctttttaacatacacaaaccagttatctctacccagccgaggtatagtcttttgtggaacgtcgacctatatctgcctcccgactaactggacaggcacctgcaccttagtctttctaagtcccaacattaacattgccccaggaaatcagaccctatcagaatgcctcaaagctcaagtctgtcagcgcagagccagacaactaatacccctacttatagggttaggaatagctactgctacaggaactggaatagccagtttatctacttcgttaccctactaccacacactctcaaaggatttctcagtttgcaagaactaatgaaatctatccttactctacaaccccaaatagactctttggcagcagtgactctccaaaactgctgaggcctagacctcctcactgtggaggaaggaggattctgcaccttcttaggagaagagtgttgtttttacactaaccagccagagatagtacaagatgccacccagtgtttacaggaaaaggcttctgaaatcagatgcctttcaaactcttataccaacctctggagttgggcaacatggcttcttccttttctaggtcctgtggcagccatctggctattactcgccttcaggccttgtatttttaatctccttgtcaaatttgtttcctctaggatcaaggccatcaagctacagatggtcttacaaatggaaccctaaatgagctcaactaacaacttctaccaaggacccctggactgacccattggccctttcactggcctaaagagttcccctctggaggacactacaactgtagggccccttctttgcccctatcccacaggaagtagctagagcattcatcacccaattcccaacagcagttggggtgtcctgtttagagaggggattgagaggtaaagccagctggacttcctgggtcaagtggggacttggagaacttttctgtctagctagaggattgtaaatgcaccaatcagcactctgtatctagctaaaggtttgtaaacacacctaatcagcactctgtaaaaatggaccaatcagcactctgtaaaatagaccaatcagcgctctgtaaaatggaccaatcagcaggatgtgggtggggccaaataagggaataaaagctggccacctgagccagcagcagcaagccgctcaggtccccttccacactgtggaagctttgttctttccttcttcacaataaatcttgctgctgctcactctttgagtccgtactacctttatgagctgtaaaactcactgcaaaggcctgcagcttcactcctgaagtcagcaagaccacgaacccaccgggaggaacaaacaactccagatacgccacctttaagagctgtaacactcactgcgaaggtctgcggcttcactcctgaagtcagcgagaccacaaacccatcagaaggaagaaacaactctggacatgccacccttaatagctgtaacactcactgcaaaggtctgcaccttcactcctgaagtcaagcaagaccacgaacccaccagaaggaagaaactccagacccatctgaacatctgaaagaacaaactccagacacaccatctttaagaactgtaacactcaccgcgagggtccatggcttcattcttgaagtcagcgagaccaataacccaccggaagcaaccaattctggacacatcagctcgctgcaacctctgcctcctgggttcaagcaattgtcctgccacagcctcctgagtagctgggattacaggtgtgcaccaccacacccagctaatttttgtatttttagtaaagacggactttcgccatgttggccaggctggtcttgaactccagacctcaggtgatctgcccgcctaggcctcccaaagtgctgggattacaggcatgagccactgcgcctggcctaagcaatgtttttttaaaaaacattcacacactaattccaagaaggttttttacaacagttcaggaatgtagtgcattacaaatagaaacttgtttttaacacagaagtggaatgcggttgatacttggctgtattaatatttgtgttacccaaaaaagtactggatgcaaactatatatataaatctgagatctaatgtggatgcttaaaaacgaacttttaaaagttcttttaaaccaaaattttaaaagtaagtccatttttataaaaattaatctatacgtatatgcgtagaaaaatctggaaggaaatattccaaatagtaatatcaaatagctctggattatatgattatagagtgttgtttttatgttgttaattttttttttttttttgagacggagtctcactctgttgtccaggctggagtgcagtggcacaatctcagctcactgcaatctctacctctcaagttcaagtgattctcctgcctcagcctcccaagtagctgggacaagaggcgcacaccaccatgcctggctaatttttgtatttttattagagacaaggttttgccatgttgccccatctggtctcaaactcctggcctgaagtgatccacccgcctcagtctcccaaagtgctgggattacaggtgtgagccactgtgcctggctgctgttaatttttttggcaaaatgagttttgccaaactcattttactgctagagagttttcttttttttacgtctttctataatatctgacttttttacatgaatataaacttcctttatactcaaagggaaaataatcaataatcctatttttatttttcaaaagagaaaaataaaggagggaaaagtctaatagaatgaaagtagataagagttgctcccaggccagggagctggaactaaccagaaggactagttcggaaatggcccaggctgagtgagataccagctccctaaacagcctctgacaagaggaaaggcagccatgcacatgagcaactttgaagtcagatggttccagaaagcgccaggcatgggcaccagatgctggtggtcctcagaggagagctctgcactagacacaaaggtcacatggccccagtcctaggagaagcatccagtctagacaagctaatgaaaaccatggtgatgtcaacagagagccacaactggtttcacaaaccactagtaaaacgttcaagttccagaaattgaaggaacacacaataaaacaataagtcctccctcttcacctatcaaaagagtaaagaatttttaaatgctggtgagggtgtgctggaattagtgctcattcactgctgttgggaattattgcattgctaatgtggtttgaaaagcaatacggtggctgggtgctgtggctcacgccggtaatcccaacactttgggaggctgaggtgggtggatcacctgaggtcatgagtttgagaccagcctggccaacatggtgaaaccccacctgtactaaaatacaaaattagccagacgtggtgatgcatgcctgtaatcccagctacttgggaggctgaggcaggagaatagcttgaacctgggagctggaggttgcagtgagccaagatcgtgccattgcactccagcctgggtgacagagtgagactccatctcaaaaaagaaaagcagcatggtgctatatatgccgattgttttaagatattcatatcattttgtaatttcatttctagaagtctgttgtaaggcaaagaaatataaaactttattatcaaagatactcattgcagtatgatttataatttttttaatgaaataacctgaaaactgtccaacaatagttggagtggtaagttctgatacaacctgtcagtggagcattatgtagccattaaaaaaaatgtttagagagcgtttgtcttatcactcaggaaaatgtttatgttaccatgttaaatgatacagtaggatataaaattgtatgtagagcatgatttaaactacataaaaattcacacacacgactggaaagaaatgctctaaaatgttacacagttacgcatggattggtcaaattatgagtgggctttttgtatcttttaaaaaataactgggccaggcacagtggctcacacctgtaatcccaacactttgggaggccgaggcagcagatcatgaggtcaggagctcaagaccagcctggccaacatggtgaaaacccgtctctactaaaaatacaaaaactagccaggcatggtggtgcatgcctgtaatcccatctactcgggaggttgaggcaggagaattggttgaacacggcaagtggagattgcagtgagccaagattgtgccactgcaccacagcctgggtgacagagcaagactccatctcaaaaaaataaataaataaataaataatttattttgaaataatttcagatttacagaaaaataaggaataatacaaagaactgccatatttctgtttcccaagtttcccgacggctatatctttccacattcacttccatgtgagttctccctctctagacacagagtggatagaatcactggtcgttttctgagagagagcttcagatacaatgcccgttgtgcctaaataccctgagtgtatttcctataaacaaggacacatgaccgaaacttccaaatcaggaaattgacattgacacaacctcaccatccaatccaccatccccaggcagattttcccagcaggtcttttttttcatttctgatacacgatctgatcatctaggaacacattgcatttagttgtcacagccctcacacctccttcaaactggaagtttctccttctctttcacaattttcctttatagtttttaagtttacaggtctttaattttataagataactctcaactggggacaactgctcaatttcccaatgggaagacccaggccatgcattcttggcaggaatagaacaaaaaaaacaaaacaaaacaaaaaaaagccccgatgcttcagtcaggaggtacgtgatgtcaactcactgcactgccagcgaggttaactttgatcacctgctcaagctgttgtctgccaggtttttctaccaaaaagttaccatatttctctttgtaactaacatattctggggaaatattccagtactacatcaatatctgcttcttcaaatcttcacctgcaagtctcagcatcggttgacaactccagcctgaatcgaccaccactacgatggctgcctaatgttgatttttcttatttccaccattccttctgcatttattagttggcaatctgttgcaagaaaaagctttcccttctctctccatttacttactcgttaatttaattatttcaacatggactcatggattcctattttactcaatgggttttattcattactatcattatttatattgattctcaaattgcccaggtttggccaatggaagtcctttccatttgacccctatatcctttccataagtcctcatccatccaagcactccctcactttctggcacaagaagatgtttcaggttcatctcatccttttcctgctgcatctctggaagcagctgcttctccaagaggccctggctcatttcaatggaggatggtgtttagaaaccaagatctaggagcttggcatggctgggtgcaatggctcatgcctgtaatcccaggttaagagtgtgggagcaagcataagagacacacaagcctgctttggcagaagggatgactttgctgggaagcttgaatgtcagtgtgtcacgtatggatgatcagaaaagcacagtgggatggtagcagcaagaggcaagatatggcaggcccagggtcagaacctaagggcaggggatggttgggcaggggtcagcaagttgggacaccctacacagaaacagccagaggagtcctgtgtaccctaatcctcccccaactgactgaccctggatagcggagatgcccctctagacaatgcccaggcaggacttggcctccttccatcctctgatcacactaggttccagtcccttgttcctgggcagccttttgtgggagagttagaacccaggaacacagcacgaccctcctctggcccaggagctctgaagggagattcagctgtgactcccaagctgtgtccccacaacactcacctgggaagggaagccaggagcaagtagagaatgtcacttacctccctgactggacagctttgcctgggcctcatttcactcctggaaccacccagaataggccaagcagagcacagggtggcaaggtggttaatgatgccagtgagaacaggtatggccagcaagaaactcaaatgacttacagctgtgaacaaataacggtgcctgttattgtcctgggactgctgtgtgccaggccaggaaaagctcagtgattcccataaactcctcagcctggacagtcacctgccactggcttacattcctctacttttcactaaggggctgtgagtcaagtttatgcatcaactttactgggccacaaggtgcccagatatttggtcagacattactccgggtgttttgggatgagattaacatttaaatgggtagaatgaataaagcagattgcttcactagggagcattttccaccggccgtgctctcagaaaattaagttggaaggacacataagatggcctgggacagagtacgtgcctggtcaaaggccagctccccgcattgccttgcattctttggaaatgtactaaatgccactgaattacacactttaaaatggtaaattttctattatgtatattttactacaataatttttttaaggaagcagtggaaatcttatctacatgaggcttgggtggaggggataatttagtgaaagaaataaatcagagccagagatccctcagagaaacctgagccccgggaaccccgccacaagtgaactagacttggaggacaatgccacagggctagaatcaagttatagaaagagaagcaaataagtgaattattgtcatcgttatgatttttattccatgctttattccactagcatagcactgactacaaacctatcataaagctgggtgcagtggctcatacctgtaatcccagcaatttgggaggccaaggtgggtggatcacttgagctgaggagtttaagaccagcctgggaaacacggtgaaacctcatctctaccaaaaaaaatgcaaaaaattatccgggcatggtggcacgcacttgtagtcccagctactagagaggctgagagatgagaggactgcttgagcccaagaggtcgaggctgcagtgagccatgatcaccccactgtactccagcctggacaacagagtaagaccctgtctcagaaaacaaaacaaaacaaaacaaaacaaaaactatcataacacatcatacaatggtattatgaaataagaaaataatactgccaggtgtggtggctcatgcctataatcccggcactttgggaggccaaggtaggtggaacacctgtcaggagtttgagaccagcctggccaacatggtgaaaccccatctccacaaaaaatacaaaaattagctgggcatggtggcatgcatctgtaatcccagctacttgggaggctgaggcaggagaatcgcttgaacgaggaggcagaggttgcagtgagccaagatcgcaccactgccttccagcctgggcaacagagagagactctgtcaaaaaaaaaaaaaaaaaagaagaagaagaagagagaaaaagaaagacagagagagagagagaaagagagcgagaaagaaagaaaccatatttcattggttgtgagatgtccatcctttcacaattcaacaattctgaaattggggtacatcttataattaatactatatcatagatggcagcatttttttctttttttgttgttggcacgtgaaaaaccaatgcttcttacaattattatgtgacatcttggaatctctgaaatactgtaaatagaagaacaaggaccatttagtctgtttctctgtggtccatctcaggaaagtaaacttggacatgccctcagctctgcatccacacagaacatagggatgttctgatggtggagtgcaacactgggggccatgaacggcctgctgccctgactgcctctattttattaagtccaacctcagccctccaagggcctgcacagctgggcaagatatatctagaaaaggaaattagtttctcagatgtgcggtgtttgcagaggaagtaaaacatggtgtttattccaggagccctgcatcctgcacttaggagctgcctttcatgcttggagggccacacaatgactcaaggctcatggccccccagagctggaggacagcccatctttgtagggggtggaggacggttagcaattacctaggaaatgttgtgcagtacttttaagggagtgttgttatccttgagatcagcaaacccagtcctcttccccagtcaccttggaggtctctccccgactgcctttaaactcaggcccagcttctcttaccctggctgcctacctgaggcctggctgggagtggaatgactgtggtggggccggggggtcccatctaggcccaggaggctaagtctaagcactaccccttaaaggcatatggtataccacaggaatcagggacatggtggccagataagacatctcggtgtcctgtatttttatttcctaaatatggcaaccttcatcaggaggcagcccaaagaccttgaatttctggatccccatggccactgaacacagctctcctctcactggagccagcatggaggctccaggctgggtgttgccctcactccctcacatcactgtggccccaggcaccttgcaggccactcaccctttctgccatgagcctcaaaagctgcctctttcaaaccagagatttcagctaaggagcctggcagggcttcagggcatgtgtgggaggcagaataatgatccccaaagatatccaagtcctaatcactggaacctgtgaactttggtcttatatgcaaaaggaattttgcagatgtggttaaatttagaagtttgagattatcttggattatccaggtgggccctaaatgcaatcacaagtgaatttacaagagaaagaaggtttaactacagaggaagcaggagatgcagaagcaagaggctgaagagatgcaaggaaggggccctgaaccaaggcatgccggcagcctccaggagttgggagaagcaaggaaacagattctctccccgacagccaccagagggttgcaaccctgccaacaccttaatttcagcgcagtgaaacccatttcagacttctggcctccagaactatgagaaaataaatccatgttgtttgaagaagcccagtttgtgatagtttgttaccagttgcacagggcccatgctctgaagggccccatgctctttttgatgctcagctcatgcttctttgaaattccaatttttgaaaagggagccccacattttcattgtgtgctgggcactgcagtaactggtccaggagcctcccacccaccccccacccccactaaatcaaacacatcacctggaacattagcattgctgaaaaataaatgagtcagaaaggccttcttttcataataaagcaatcatagacattgtgggagagagtacaaaattcacataaatttaagaggtaaaacaagagacttcaattgtttttttaacctcacaaatgttacttctggccaaatacccaggcccacagggagaggcactagccctccttcgccatcagggtggccaccctggagcagccacagcatttctcactctccacccagtcttctcgtgatgccacctccaggaatcttctgagaattggtcacagagtgttggtgcctccactccagcccactctttctacatcaaaactccttggattctcctgcctctctcatggcttctgtccccaaaaagcgtagctccactggcatatttgtagcacagaccctgtcggggactcactggtcagctgtcccagcctgggcccctgggttaaggtcatggcttgttcagctggtgttgaaatgagtctgcctgggatttgaagtcagacagctgagggttcaaatcttggccccaccaaagaccagggacatattctttcaattattcaaccactacagattgctacatgggtggtgctgtcacagacaaggatgacacagcagcttgttggattatatctttccaactcagtatggttgccaccccttctactgccttctttgtagaaggaacaccaagaagcacattacccaggacttcctcctttgtttgtttctgggttaaaggctgttaatgagaagtattcaaacaagttttggaaggcaaaagagaagccatttttctccaaaagttgtgggctgacttatgggcagatggcgggcatgaagtttgcagaaacttagcttcttgaaagttatttaagatttgcacagctttggcagttccaagatggatgaataggaacagctccagtctacagcacccagcatgagtgatgcagaagacaggtgatttctgcatttccaactgagctttgaacagagtagttgttctcccagcatggagtttgagatctgagaacggacagactgcctcctcaagtggatccgtgaaccccaagtagcctaactgggagacacctccaactaggggcaaactgacacctcatacagccaggtgcccctctgagatgaagcttccagaggaaggatcaggcagcaacatttgccattctgcaatatttgctgttctgcagtctccgctgatgatacccaggcaaacagggtctggagtggacttccagcaaactccaacacacctgcagctgagggccctgactgttagaaggaaaactaacaaacagaaaggacatccacaccaaaaccccatctgtatgtcaccatcatcaaagaccaaaggtagataaaaccacaaagatggggagaaaccagagcagaaaagctgaaacttctaaaattcagagcacctcttctcctccaaaggaacgcagctcctcaccagcaacagaacaaagctggatggagaatgactgacaaattgagagaagaagtcttcagacaatctgtaataacaaacttctccgagctaaaggaggatgtttgaacccatcgcaaagaagctaaaaactttgaaaaaagattagacaaatggctaactagaataaacagcagagagaagaccttaaatgacctgatggcgctgaaaaccatggcacgagaaccacgtgacacatgcacaagcttcagtagccaattcgatcaagtggaagaaaggtatcagtgattgaagattaaatgaatgaaatgaagcaagaagagaagtttagagaaaaaagagtagaaagaaatgaacaaagcctccaagaaatatgggactatgtgaaaagaccaaatctacttctgattgttgtacatgaaagtgacggggagaatggaaccaagttggaaaacactctgcaggatattatccaggagaacttccccaacctagcaaggtaggccaacattcaaattcaggaaatacagagaacgccacaaagatattcctcgagaagagcaactccaagatacataattgtcagattcgccaaagttgaaatgaaggaaaaaatgttaacggcttccagagagaaaggtcgggttacccacaaaaggaagcccatcagactaacagctgatctcttggcagaaactctacaagccagaagagagtggggccaatattcaacattcttaaagaaaagtattttcaacccagaatttcatatccagccaaactaagcttcataagtgaaggagaaataaaatcctttacagacaagcaaatgctaagagattttgtcaacaccaggcctgccttgcaagagctcctgaaggaagcactaaacatggaaagaaacaaccagtaccagccactgcaaaaacatgccaaattgtaaagaccatcgatgcttggaagaaactgcatcaactaacgagcaaaataaccagctaacatcataatgacaggatcaaattcacacataacaatattaaccttaaaggtaaatgggctaaatgctccaattaaaagacacagactggcaaattggataaagagtcaagacccatcagtgtgcggtattcaggaaatcatctcacatgcagagacacacataggctcaaaataaggggatggaggaagatctaccaagcaaatggaaaacaaaaaaaggcaggagttgaaatcctactctctgttaaaacagactttaaacaacaaagatcaaaagagacaaagaaggccattacataatggtaaagggatcaatgtaacaagaagagctaactatcctaaatatatatgcacccaatacaggagcacccagattcataaagcaagtccttagagacctatgaagagacttagactcccacacaataataatgggagattttaacaccccactatcaacattagacagatcaatgcgacagaaagttaacaaggatatccgggaattgaactcagctcagcaccaagaggacctaataggcatctacagaactctccaccccaaatcaacagaatatacattcttttcagcaccacaccacatctattccaaaattgaccacatagttggaagtaaagcactcctcagcaaatgtaaaacaacagaaattataacaaaccatctctcagaccacagtgcaatcaaactagaactcaggattaagaagctcactcaaaaccactcaactacatggaaactgagcaacctgctcctgaatgactactgggtacataacgaaatgaaggcagaaataaagatattctttgaaaccaatgagatcaaacacacaacataccagaatctctgggacacattcaaagcagtgtgtagggggaaatttatagcactaaatgcccacaagagaaagcagaaaagatctaaaattgacaccctaacatcataattaaaagcactagagaagcaagagcaaacacattcaaaagctagcagaaggcaagaaataactaagatcagagcagaactgaaggaaatagagacacaaaaaacccttcaaaaaatcagtgaatccaggagctggtttttcgaaaggtcaacaaaattgttagactgctagcaagactaataaagaagaaaagagagaagtatcaaatagacgcaataaaaaatgataaaggggatatcaccaccgatcccacagaaatacaaactaccatcagagaatactataaacacctctatgcaaataaattagaaaatctagaagaaatggataaattcctcgacacatagacccttccaagactaaaccaggaagaagatgaatctcttaatagaccaataacaggctctgaaattaaagcaataattaataggctaccaacaaaaaaaagtccaggaccagatggattcacagccgtattctaccaaaggtacaaggaggagctggtaccattccttctgaaaatattccaatcaatagaaaaagagggaatcctccctaactcattttaagaggccagcattatcctgataccaaagcctggcagagacacaacaaaaaaagagaattttagaccactatccctgatgaacatcgatgcaaaaatcctcaataaaatactggcaaaccaaatccagcagcacatcaaaaagcttatccaccatgatcaagtgggcttcatccctgggatgcaaggctggttcaacatacacaaatcaataaatgtaatccagcatataaacagaaccaaagacaaaaaccacatgattatctcagtagatgcagaaaaggcctttgacaaagttcaacaacacttcatgctaaaaactctcaataaattaggtattgatgggacgtatctcaaaataataagagctatctatgacaaacccacagccaatatcatactgaatgggctaaaactggaagcattccctttgaaaactggcacaagacagggatgccctctctcacttctcctattcaacatagtgttggaagttctggccagggcaatcaggcaggagaaggaaataaattgtattcaattaggaaaagaggaagttaaattgcccctgtttgcagatgacatgattgtatatctggaaaaccccgtcgtctcagccccaaatctccttaagctgataagcaacttcagcaaagtctcaggatacaaaatcaacgtgcaaaaatcacaagcattcttatacaccaataacagacaaacagagagccaaatcatgagtgaactcccattcacaattgcttcaaagagaataaaatacctaggaatccaacttacaagggatgtgaaggacctcttcaaggagaactacaaaccactgctcaacgaaataaaagaggatacaaacaaatgcaagaacattccatgctcataggtaggaagaatcaatatggtgaaaatgaccatactgcccaaggtaatttatagattcaatgccatccccatcaagctaccaatgactttcttcacagaattggaaaaagctactttaaagttcatatggaaccaaaaaagagcctgcattgccaagtcaatcctaagccaaaagaacaaagctggaggcatcacgctatctgacttcaaactatactacaaggctacagtaaccaaaacagcatggtacttgtaccaaaacagagatatagaccaatggaacagaacagagccctcagaaataattccacatatctacaactatctgatctttgacaaacctgacaaaaacaagaaatggggaaaggattccctatttaatcaatggtgctgggaaaactggctagccatatgtagaaagctgaaactggatcccttccttacatcttatacaaaaattaattcaagatagattaaagacttaaatgttagacctaaaaccgtaaaaaccctagaagaaaacctaggcaataccattcaggacataggcatgtacaaggacttcatgtctaaaacaccaaaagcaatggcaacaaaagccaaaattgacacatgggatctaattaaactaaagagcttctgcacagcaaaagaaactaccatcagagtgaacaggcaacctacagaatgggagaaaatttttgcaatctacttatctgacaaagggctaatatccagaatctacaatgaactcaaacaaaggtacaagaaaaaaacaacccatcaccaagtgggtgaaggatatgaacagacacttctcaaaagaagacatttatgcagccaaaagacacatgaaaatatgctcatcatcactggccatcagagaaatgcaaatcaaaaccacaatgagataccatctcacaccacttagaatggcgatcattaaaaagtcaggaaacaacacgtgctggagaggatgtggagaaataggaacacttttacacgttggtgggactgtaaactagttcaaccattgtggaagacagtgtggcgactcctcagggatctagaactagaaataccatttggcccagccatcccattactgggcatatacccaaaggattataaaccatgccgctataaagacacatgcacacgtatgtttattgtggcactattcacaatagcaaagacttggaaccaacccaaatgtccaacaatgatagactcgattaagaaaatgtggcacatatacaccatggaatactatgcagccataaaaaatgatgagttcatgtcctttgtagggacatgaatgaagctggaaaccgtcattctcagcaaactgagaaatggacaaaaaaccaaacaccgcatattctcactcataggtgggaattgaacaatgagaacacatggacacaggaaggggaacatcacacactggggcctgttgtggggtggggggagggaggagggatatcattaggagatatacctaatgtaaatgacgagttaatgggtgcagcacaccaacatggcacatgtatacatatgtaacaaacctgcacgttgtgcacatgtaccctgaaacttaaagtataatttaaaaaaaggaagtgaaggacaataaaaaaataaaaaaataataataaaaaaagaagttgggaagaggcagggacccctgactggtttgggagactccagggctttgccatcagggttacagccttccaccagggtcaagctgtggacacaatgattggtctgtccacaatacctgagtctatgatctgccatctgaacccactatactatgaaatggattattatttcaaagcatgaagaaaatacaggagagaagtcatagggaccgaacatccaatccattcccctgcctctaaggaggacttcatccaaccaactccaagaagcgcaaatcaatggagcaatgaaaattggacacaatttttaaaccataagcagagatctcttaagacccaccatgtcctttcaaatccaagttcccttttatttctttcagagatgacttgaggcctgtgtgacccaatcacatcactggaaaacaccctcatctcccctgtgctgctctggaagagtcatcaccggcctggacagagtctccactgtgacatttgggagtttattctagatatttctcatatttgaaaatacaaagcccgttgttatcaaattggcccaaggcttccaagacgaagaagcatttaatcctggggctgcttctataaatgtaacaattatcccaagtcatgtaagtgtcttggagaagtaatagtaataatgatgatgatgatgatgatgatgatgatgatgatgatgatgatgataagagccaatattcattgagtgtgccggtctcacagtgttttacttgtttcaactcctttgatcctcctaactgcctggagaggcaagaattattatcgccctcattttaccaagattgaaagagaagcatcaagagatttagtaatttcccaaggtacacacaatagtaggcagaagagccaggatatgaagctacacagtttcagggtttgaagtcttacggaattcaagttcaaatccgggtctgccacttcacatacgcatgatctaaagaaaatgatttcatgtctttgagcttcagtttctccctaaagaaaaaaaaaagaaaaaaatctcagtttatcctaaaatgggggtggcaatacctacttctctagaagttgttgaaaattaaatagaatactctgtaaatttctcagcatgggcctgacacataaaagggcatgggttcccttcccttcccctgtgtggatgcaggaagtgaaggcagaggctggggaagagggggattctaaggtcctggaaccctagagaggaagcttgctgactgcaggaaatttcagacaaggagacaattcttggggtctattgagatatgacaggaacatttctagaacaggatcccagacgtctcatacaatagtagtaagaggaatagcctaaccttcatgcagtttacagagtacttatatgtgcagtaagactgtgattgacaccatgggtgcctgaggcagggctcctgtgtacagttgtgtaggttgcacactgaagccgcccagatggagcctacttttagggagtggtggcatggagggcttgcctggtcacttaaaggaatcttcgagggtcacaggggaatgaaacagggggctgagcaagtagcagtcaacatgcccttcccagtacaggataagtgcttgatagatacttgctgagtgattaaatgatggctgggggagttgccagactggaggcagggaatcgtgattacaacaactgaggtgcaggctgggcactggaatgctttcatcctctcctttttgactgctgagcacttgcatcacttccagtgtcttgctgttggaaacactcagcctcacacgttttgcccgggcctgtgcctggctccatctgcctctggcatttctccccactttctgagtcagactggggtggggaaaggctcctttaaaggtgcctaaggagaagtggctgagaagcacttcctggcacagccctcgccctggaatcagaaagggcagagaagacacagctcgtctgccccaactccaccccagctcaggtccaggttgcctatgcatgtgaaacatcatcctgcatggaaagccacctgataaaaagtggttccaagcaaaattcatttttatttgcccacatccactttaatacaagtcatcactcagcattcacaccccacagccaccatccatctcgatggataccagctaccatcctcctagagccacgggccagagccaaagctcactgccccaacatgcccaagtatctcaatgtcacctttatggcatttaatctatttaacacttatgaagaaccagaggctcctagggcctaatattcaaactaaatcttgaaccccaaatgagaaagaaccagcctctctgaaccctgaaatgaaaatctaaagacaatttttttcctgaaccacgaaccaaagccaaatgttcccaagaaatatccaatgaactattttgaccatgactgtgagctttgaagttagtaaaactgagcctcatttccctatctgtagaataaggataaaagtgacctcatagaatggttttgaaggttaagatgagcaacagcttatggtctccagatggtccctgatacagactcagcccatcagcattcttctcctaaagcattccccttctgtgtggcaaccattattagagtgagagaaggatggctttgaatttaaacacatctcatgaccagacacagtggctcacgcctgtaatcccaacactttgagaggccgaggcgggcagatcacttgagttcacaagaccagcttgggcaacatggtaaaaccccgtcgctactgaaaatacaaaaaattagcaggcatgttggagtaggcctgtagtcccagctactaaggaggccgaggtaggaggatcacttgagccggggaggcagaagttgcagtgagctgagattataccactgcactccagcctgggcaacagagcaagaccccatctcaataaataaataaacaaataataaataaaaatacaaaaattagctgggtgtggtggtgcacacctgtaatcccagctacttgggaggctgaacccacaggcagaggttgcagtgagcccagatcatgccaatgcactgcagcctgggcaacagagtgagactctgtctcaaaaaataaataagtaaataaataaaaatgaaaagacaccttgcttcctggttgcgtgactcttccctccatttgaactcagttctcacacatggaaggtggggtaataagaaccttcacagagtcgtgttcagtacttccctaccttcatcaagtagcttgcattccccaggggccatctccaatgtgctcacaaacaagcggggtagtgtctgggtggtgtttgaagggatttcccctcctctggctccagggattcccctgtgatgacactgcacctacagaaatcctgccccctcctctgcccaccttaccagtctctgaccaagggggtctggtggagagcaccacaccactccccgcctttctcttatgggggtaccaactctactccgctcatgcccccaacatcttaaacagttttagaatttgtcctcacagttttcactcaaaatgagacaaagccaagggacaaatcagagggacagtggccacacagtacccagcatcactccttgctccgcttgctaggccaagctgtcaaggctggttcctgacacttcctttaacgggttcactgtgcagagatgccccactagttcaccagatgtgcttgaacccaactcagtgcgagatgggaccagtgctgtaactcgttacttccaccatcgtcagtgaaacttccaaagtcagtgaaccgcaacacagtaggaagacctaaatgttccctgagccgaacttgagctggtctctagatgagtgtgacatcttcttagatggaagaaggaaacttaaagtgttttaaaacaaattttatgtgtaaaagtcatcaaaattataatacaattagaatatgaacatcttaatagagatttcatgatattagagaatatgttcattttttgtaggtgtgaaaatggtattgtggttttgtttggttttgtttgtttctttgagacaaggtctcactctgttgtccaggctgcactccagcgcgatcatagctcactgaagcctcaacctcccgagcgcacgcaatcctccctcctcagcctcctgaatagttaggactacaagtgtgcgccaccatgcctgattagttttgttcttgttttttgtagagacagggtcttgctatgttgcccatactggtctcaaactcctgcctcaggtagtcctcccacctctgccttcccaagtgttggaattataagcatgagccactgcacctggcctataataaaaagtttttataccagttcttttaaggtatccactagatctcaacttctgaaaccagccctaaaactggacctttgaactatactgaggctagctcttctgtcaaaactacttgcctggcaggcaaaaaaaaaaaaccatgctattccccctctctactcaagaaccttccatggctccccattgccttcacaatacaatattttttgcctctcctttaagacctgccacattccatcccagtgtagctttccactgttctctgcctagccccactgagaatgccaagccaacgcaatatcagacagcatatgcccctctgaaaaggcctgcattttcccgtctctgattctgagcctttgatcaccctgttcctaccatctagaattctttccctattttttttttatttatttttatttttagacagagtcttgctctattgcccaagctggagtgcagtgggagtgatctcggctcactgcaacgtccgcttcctgggttcaagtgattctcctgcccagcctcccaagtagctgggactacaagtgtatgccaccatgcttggctaatttttgtatttttagtagagaccaggtttcgtcatcttggccaggctgatctcaaactcctggcctcaagtgatccacccgcttcagcctctcaaagtgttgggattacaggcgtgagccactgtgcccagccaaactttcttaaataattcttatatagaaaaatgaaatagaaggactttcacttccaatcaaggtgaaataatagagaccagatttatactcctgactgaagcaaccaaaaaacagacaaaatatatgaaacaagagttttcagggcattggacatggttaacaaaggacagtgattcctgagtagggggaaacagaccaggcaagccccccagttgtccagttacagctcgggttttcaggccacaacgcagcaaaggaaaggcagctggatctcacaggacagagtaccagagaggagagaactgtgcagagagagctccagaaatgctcagtctcttgactctgtccacttctctccatccccactgtcactacctgatcccagaccaccatcatctctcatgaggatgcctgcagcatcccttccatctagtcacactgcacagataaactcatccctgaaggcactgctctacttccgggagctccccattgtcatcgggataaagtacagactccccacttcggcttttaaggccttttatgatctggccctgcctgttttttccagttctcttttatccctccccaacgtcacatttcacatagagtcaatacttgctatttctgagttctccatactcactcttgcctctaggcttttgcacatgtagtttcctctacttatgtttccatctctttcctccactcctttgtggtatctccttgcggccacttcctctgagaggaagtctccctaaccccacaagactgcaccagatacccctcctgggggctcccgtaactctgtgtccctccttctaacactgcctgagaaatgtatgtctatccatcttctgccataggcagtgagctccctgagagcaaggacttgatgatattccctgctgggttcccagcacctagcacatagtaagcactcaataaacacttatcaaattatcgactgcctcgatggtcacatgctatcttacagcagtcagcacatgatccgtctgcctccaaaacccatgtccttttattcctctggaacacacaggaggggctggggagaaggctatggactgacagtctttggaagtttaccttcaagcctaccctaattgtgtgtgtgtgtgtgtgtgcacatttaggcaacctctacttccattcccctaatgcatggtttccaaccatggctgctctttggaatcatccgggaagctttaaaaaacactgatgcctgggtctcacccccagaggtccttattggatggtctggactgtggcctgggcccccccaccaggtgcttctactcatccggcaaggctgagaaacgctgccttgagagttatgatcccttttcagcatggctcctattcacccttcaagacccaggacaaatgtcactccttggagaagacttcccaagacactcacgcacatcccagaattaattcctcacttctctgttctcctttagtgttttaggcgtatctctagaatggcagcttttacactttaacacctggtgcagtgtccagaacatagaaggcactgacagagatttgttgaatgaacaaacacacgaatgagcggattcctaaatctgacattccggctgtggtcccaaagcccacacagaggctggacatcagcatgcagtaagtgacagtcccgcagaaggagggagggagactgatgttccctctaaaccagctggaaggatgctgcactcagaggaagaacagccagacacaaggtaattgtcgctcccccagaaattatggtaacaaagtcaaagagatgcatgatcattaaacaaagttttctccttggcatttttaccaattgactgatggatcagttacaaaaacactgaatacataatgaaatgatggcctggagagggcctctggtggggaggcctcttgtagccatttttaagagcagaagtgcaggtttattgaatctggcggttgtgctaaattctgactcttaaaaccaaggctgttaaaaaggctgtcccccacatgcacacgtatgtttattgcggcattattcacaatagcaaagactcggaaccaacccaaatgtccaacaatgatagactggattaagaaaatttggcacatatacaccatggaatactatgcagccataaaaaaggatgagttcatgtcctttgtagcgacatggatgaaattggaaatcatcattctcagtaaactatcgcaagaacaaaaaccaaacaccgcatattctcactcataggtgggaattgaacaatgagatcacatggacacaggaaggggaatatcacactctggggactgtggtggggtggggggaggggggagggatagcatcgggagatatacctaatgctagatgacgagttagtgggtgcagcgcaccagcatggcacatgtatacatatgtaactaacctgcacaatgtgcacatgtaccctaaaacttaaagtataataataaaaaaaaaatagttacagcttaaaaaaaaaaaaaaaaaaaaaaaaggctgtccccgcctgtcatcagaggtttacaaacgcttcaactgcggctgcttctgcaccatccaacttaccttccacatgcacccatgctccgaggacctcaccctggccacctgtcagagacacccaggaagcttttcaaagagaataaggctgggcctctccactctgccctcccacccccgccaggtaggttctaatttaattggtctaggtggagccttgggtattgggagtttaaaagcactcccaggtggctctaatgtacagctagctgtgaggaacactgatccacagcacatgacttgaggggtgctggggatccacctgggctacaatgcccaccagcctgccagaagggccaaagtcctaggcgcttgcagtagtcctcagccctgagcacataccagaattatctggggagcttgcgaggaaaacagatactgggaccccacctcaggccattttacagctcctcaggaccctaatgagcagccaggcttgaaacccactgggctgaagcaatgcgccccccaaccagtgtgatggagagcccattaaacacaacgcctcctgctctgaagactcggcaataggtttgagtggatttcaggacctttatttttttttagtgatggggtcttgctatgttacccaggctggcgtgcagtggcataatcacagttcaccgcagccttgaactcctaggttcaaacgatcctctcacttcagcctcctgagtagctgggattacaggtgcatgccaccatgttctgctcatttcaaggactgggtttttgtggggttttttttttttttttggcttttttgagacagggtctcactctgtcactcaggctggagtgcagtagcacagttgtggctcactgtagccttgactgcccgagatcaggcgatcctcccacctcagcctcccaagtggctgagaccacaggggcacaccaccgtgcctggctatttttagtattattatttgtagagatggggtctccctatgttgtccaagctggtcttgaatgcctaggctcaaatgatcctcccacctcagcttcccaatgtgctaggatgacaggcatgaaccaccgtgcctggcaagagtatgtttttgttttgttttgttttttgagatggagtttcactctcgttgcccaggctggagtgcagcggcatgatctcagctcaccgcaacctccacctcccaggttcaagtgattctcctgcctcagcctcctgagtagctgggactacagacgcatgacaccacgcctggctgatttttgtatttttagtagagatggaaggtttctccatgttggtcaggctggtcttgaactcccaacctcaggtgatccacccgcctcggcctcccaaagtgctgggattgcaggcgtgagccaccgcaccaggcccaagagtatctatttttaataagcacccaggtcatgcttaccttcctgctagcagcagtcacccaaacttgcccgatcataaggactttctaggacatgtgttcaacagattctggatcccaccccagacccactgaatctgaatctgcatgaaagagacccaagaaccccataggtaacaagctccacagttgactataggacaaggcatgtatgggaaaattgagcaaaaatattgtgaaacctgggaggccatctaaaattaaccaggagaggccgggcatggtggcttgcacctgtaatcccagcactttgggaggctgaggctgtcgcttacttgacatcaggagttcaagaccatcctggccaacatggtgaaactctatctctaccaaaaacacaaaaattagccaggcgtggtggcgcatgcctgtagtcccagctacttgggaggctgaggctggagaatggcttgaacctgggaggcagggtttgcagtgagccatgatcgccccattgcactccagcctgggcgacagagcgagactccatgataagtaagtaagtaaataaataaataaataaataaacaaaattcaccagaagaaaaatgagttatgattattctccacccttaaagaattaaagagttcattccgtcagtcacttagttggtcaacaaacattttctgcacatctattccacagcaaggatcgctaatacctgggatacaggttggtgagacacaagtctgcattttccaactacatgggctggtccacctcaccatgcagacaatctccagttcctccccaagaatccctgggcccacaaatctgctcatctttcaagaccttgctctgacctgactgtgctaaaaggcagcaccaacctctgccctttgttcctcattgtccctggacatgcagctgctggcccatttataataatgctggcaagtacttgttcttctagtgggagctgtccccgaagtctgggactgtggttcgtttatctttgcaaccctggtcgcttgcacctggtaggccctcaatggaggcttacggtttatcaggacagaaagacacgtaaacagatacacacagtgaaaagtgccataatagaggtcagtgttgacaatgaacatgcaggcattggggtcagacactgtgcttgaccctacagggccctatagggctgagacaaggatcaagcatgatcccgtcccgggttacatcctccagtctaggaggagaggtggagagcaacaaccacaatacaaggccaaagaggggaagggagtggatgccagggaagcagaaacaaggcatcccctaaagggcacataactctggttattaatcaggggctgcttcaaggagaagtaatgtctgaacttggacttaaaggggggatgtgtatgtttgaatgagcagacatgggatagaaagacatcccaggagaaggcaatggtgtgagcaaaggtaggagacagaagggcaaaaagcatgtctgggagggtccaaagctaggagatggcgtggcccagagcccaggagcagagtgagtctggagagtcccaggcaggagtgtaaaaggaccctggtcttcctttgtcttcatggctcccccaagtgaccaccagaagactgttggccccctttgactgttatttccacattttctggatttttttttttttttttttttttgagatgaagtctcactctgttgcccaggctggagtgcagtagcacaatctcggctcactgcaacctccacctcccaggttcaagtgattctcgtgcctcagactcccgagtagctgggactacaggcacgcattaccatgcccagctaatttttttgttggtttgttttttgtttttgagatggaatttcactcttgttgcccaggctggagtgaaatggcacgacctcggcccagcgcaacctccacctcccgggttcaagcaattctcctgcctcagcctcccgagtagctgggattacaggcatgcgccaccacgcctggctaatttttgtatttttagtagagacagggtttctccatgttggtcaggctggtctcgaactcccgacctcaggtgatcttcccgcctcagcctcccaaagtgctgggattacaggcatgagccaccgtgcccggccacggctaacttttgtaattttagtagagacaacgtttcagcattttggccaggctgatctcggactcctgaccgcaagtgatccacccccatcggcctaccaaagtgctgcgattacaggcatgagccaccacgactggcccgatttatatttcttaattcaatttccttgattcacacattcccagtatttacaacatttcccctgggcctcaggaattcatcacatgaaagttgagttatctgtgctgaacagcagcttgacatagctacatacacaaggtcaagaggtggctaactagagtctcattggggacgctggatcctgcatttgtttctttacgggattagttcaaaatagatcacaggttccttcaagtaagggggctgccactttttcctggccttctctcccagtcccacgggctgaggtcaatgtctcgtatcctgaacaagagctctatgagccccaggtgacctgagtccagctccctggggtcctggatggagtctagtggagacagactaggggggcagggcacgaacctattggacagtcctgggcccaggagaacctgggagaaggagccagaagtctgttcttggaatccccagccaagggagagggaggcaggaacaataaccaggccatagggcagtggtcagaggtctgggagtagctaatgatcacagccacgaaaagaacaaaaatgtaaacaggcaagagcagggttcaggggtcgtcatcaagtaaagataagatacaggccatgtgcggtggttcatgcctttaatcccaggactttgggaggctgaggcgggtggatcgcttgaggtcagggagttcgagaccagcctgaccaacatggtgaaactctgtctctactaaaaatacaaaaaattagccgggtgtggtggcgggagcctgtaatcaatcccagctacttgggaggctgaggcaggagagttacttgaacccaggaggcggaggtcgcagtgagccaagattgcaccactgcactccagcctgggtgacagtgcgagactccatctcaaaaaaaaaaaaaaagagaaaagggatttagaaaaaaaaaaaaatacaagctgggcgtccaccaggggactccttcaacagggactagagacttggattcccctcaaaggcaaggaccaggtctcaaactttaagtcctaagcatgtggtgactgcctgtgaccctccggagagctggctggcaactggctggccaggcttatgccctctttatagcagcactgtccagaagaaatatagtacaagccactccataagtgtaaatgttctagtagccacagtaaaaaaagtaaaaagaatcaggtgaaacggattttaaagatatatttatttaactcagtgtatccaaaatattatttcagtgtgtaatcactataaaaactaataagatttttgctttttttaacctaagtctttatgtattttgcactcacagtgtattgcaattcagacaagccacaagtcaagtgcacagtagctgcgtatggctgatattcctgtgctggatggcacagcttcagaatgtctgatttgggatctgtcttgcagatgcgagagatgaatatccttctcatccatggccaaagtggacgcaatttctatggctggcaagaatagtgtccccttctgtcctcatcaccacttcatgtccctcctgaagccacacacctgatggagatatcctcccagataaagaatgggtgcaaatgtagtgtgctcccttctagattctctaaaccagtccagtccacaaggcccatttgcaggcacatgcatattaggtcttaggacctgcacaagccaggcatggtggcttatgcctgtaatcccagcactttgaggtcaggagttcgagaccagcctggccaacatggtgaaatcccgtctctactaaaattacaaaaaaatttagctgggtgtggtgggggtggggggtgcctgtaatcccagctacgtaggaggctgaagcaggagaatcatttgaacccgggaggtggaggttgcagtgagctgagatcacatcagtgcactccagcctgggcaacagagcaagactccataaaaaaaaattttttttaatacttgcatggtatttattaatactaggggaaaggcttttgcaaagacagctgaaggggaagacatattggtgcactagggctgccataacaaagtacatcagattaggtggtttcaacaacagaaatttattttctcacaattctggagtctggaagtctgagatcaaggtgccagcagggttggtttcttctggggcctcccctcttggcttgcagatggccatcttcttcctctgtcttcatgtggtctttcctctgtttatctgtgtcctaatctcctcttcttataaggacactaatcacgcttgtttagggtccaccctgatggcagcatttcaacttaattacctctttaaagaccctaactcgaaatatagtgacattttgaggttctgggggttgggacttcaacatatggatttgagaaggacacaatttggtccataacagaagaaaagcatgggacactctgagattaaacactaaggctgtgcacagtggctcatgcctgtaatcccaacactttgggaggccaaagtaggaggattgcttgagcccaggagttcaagaccagcctgggaaacatagtgagacccccatctctgcaaaaaataaaaaattagccaggtgtggtggtatactcctatagtcccagctacttgaaagtctgaggtaggaggatcatttgagcctgggaggtcgaggctgcagtgagctatgattgcgccattgcactccagcctgggcaacagagcaagatcctgtctcaaaaaaacaaacaaacaaacaaaaaccacactaactaaaagctcctcccaagatccttcagacctcaataggtctaggagtgagaaagagcctatattttcaaagcttcaagcaggcctctcttttacaagtgttgaattaacccctgggagaagatagccttttattttaggaaaaatccactctgtgtgactctttcttgtgaagatgtaaagcaaatgttcctgtagctatggagatagtggagacagctgggctcctgggaaccaaatgagtccacaaggtgccagggaaggttatctgtgtaagtagaaaatgcttcttggagtaggcatggctttggactgtcctgtgctagaaaacaatttcttccacttaggaaaatgtatagtcttacgtaggtaacacccacaggagatgagaatctgaggcaggcctagtttttaccaagagctggagaagagcctatagaaagaacctgagccacacttcagtgcagtgctgcccagaccgcaccattaacgtccccaagatgctattcaagatgaggccgctgagactgaggctggatcactgagtcttgaggtataatcatgttgtgctttgagtgcaaaaacacaccaaggagggtgtgttcccatacggggagtagacattcccactctcgatcatcctgggaagaagtcgtcccagaatatacaagactggggctgcaagttttcacctaaaagggaaagaaactcatctcctccatttatctgcagaagtgggagagagaccaactgggcagaggtcagctgggctctatgacatgcccactgacatattctgtttaggatggcaggggtggcaagtgacaaccaggacggaacagctgaacacataagcatcctctagagaatcccagaaatactcagagaggagaggagaaacaagatgaggcttaaagggcaatatgaatattaaataagctttttcagtagctactagctgaggcttggatctgtttgcccacttccactaggctatgagttctgaaggccaaacctgttactcatatttgtgtctccagaatgatcctagcagaaaaaaggggctcaataatcatgtgatgcatgaacctggaaaccaagcccactcctgcagagggaaagctgaggcacaagggtattcgggacctcacggatcagaaaggaactctggggaatcttgaatgatgttttttctcggtacctcccaacagaaagagaaaaacctgcctcccatcctccaatgtgcctctcaacagagaaacaatattgaaaagccagcagaaagctttaacagaaaagaaaagcgagtggctcatggtaagccttgtgtccacgcaaacattctgtggatgaagaagaaaataaccaggagccaacatccacacaggccaggcaccagggctcccttctcctggcaccagtttctgaaaatgacttctctcccaaggaccccaaaaataagggggagctaattgcatcccagagccctccccatctggactgaagtcaaggagagacaaggaaagagctggggcttgacaagttcattagaagagggctcaagagcaatgtggctctgccaacagcatccaacagcaggaggatctaaacaaacctggtttctctgttctcagcagtccttctgatgaaaaggactggcatggttttactgcctagctggttaagcaaaaaaagaaatgtatttaagagcagactggagatgaaacattcagagagtaacacccatggtttgataaggaaactgtcactgaaggcaagtcctaagtgccagaaacctggtcctgctgcaatcactactgtagccagcactgatttcatgtcagcaccaggaacatgaacttgctaccaccggcagtcaccaccaaaagctgggcacccttgttgccatccacaccagcaaacatggctgctccagccacagcctgtttctccctggggctcccacttgaaccagtgtcagtatggacgcatctgattggtggagcctggcccaggtctatgtcccagacccagggcaggctgggaacttgagttctgacttcctcataagacataagaggaacttccctggaaacagaaagacaattcaaaagggcatttcaaggttaagaaaagttcatggtggtgatggtagcaaaacagtgtgactgtatgtaataccacttcaaaatggttaagaaaggtcaggcatggtggctcactcctgaaatcccagcactttgggaggctgaggcaggaggatcccgcttgagcccaggaattcgagatcagcctgggcaacatggtgacccctgtctctacaaaaaattaggctgggcgcggtggcttatgcctgtaatcccagcactttgtgaggccaatgcgggtggatcacctgaggtcaggacttcaagaccagtctggccaacatggtgaaaccctgtctctactaaaaatacgaaaaattagccaggcgtggcggggtgcggtggctcatgcctgtaatcccagcactttgggaggctgaggcgggcagatcacgaggtcaggagatcgagaccatcctggctaacacggtgaaaccccgtctctactaaaaatacaaaaaaaaaaaaaaaaaagtatccaggcatggtggcacgtgcctgtggtcccagcaactcggggagaaaagcttgaacctggaaggcagaggttgcaatgagccaagatcgcgccactgcactccagcctgggcaacagagcaaaactctatctcaaaaaaaaaagaaaatacaaaaaattagcgaagtgtggtggcagctgcctgtagttccagctactcacgaggctgaggcaggaggatcacctgggaccagggaggtcaaggctgcactgagccgtcgtcgcactactgcactccagcctgggtgacagagtgagatcctatctcaaaaaaaaaaaaaaagggtggttaaaacgctatattttgttatgtgtgttttaccacgaagaaaattttgaagttaactacaaacaaacaaaaaaagacattggacagctgtgtgacaaacagccatggctgatatcaatcactgttggtgaataagtaaataaaggcattaggcagagacataggatcctcagacccacagtagtaatgaccagtcactgtttaacctttctcagtttactgagcattttcagcgtactttgtacttcctgctatcatagctcacaccacacaggaggactgttgtttacgtaatcacagctcatttgtgtgagtatttagtgtgcctggtgcttccacccattatgtgttactcctcactgcaacctggaggtaggtgttgggtgccggtattgctcagaagcagcaattcatttgttatacttggggaggggaggctctcggaataagtcaacagaaatagagtgtgaagttagcaaattcaaggtaaagatccagaagaaactatagaaaactaaagaaacagagaaaataagagagaaagttcaacatatttattttttgtgaccacaaagtgagaagcctagaatagcctgaaacacagagaaatttaaccaaataggcataggactaaaatgctaaaactaaaaactaaaatggcataatgccctacatctggtagccctggcaacaggcctcccaccttagagtatgatgttataatgagaaaaaaacacgtgcaaataaagtaaatagtcattccacggctgtggagagaattggatttgatgaatgtcaagtcttcgcacatttccaggcccccactaaaggagaatcaatcagcaacagttctattcccattttcagatggaaaatctcagcctcatatgagtgaaggaacattgccatttgctatcaaagacagatcttgatcctatttttttcaaccccaaattccaagcctttggctcatctgaaggtttgggtgggagtgtgaggaggactaaatacagtggacctgtattttaaaaatcaatatagtctggatgcggtagctcacgcctgtaatcccaacaccttgggaggccgaggttgggcggatcacctgaggttggaagttcgagaccagcctgaccaacatggtgaaaccctgtctctactaaaaatacaaaattagccggctgtggtggtgcatgcccataatcccagctacttgggaggctgaggcaggagaatcacctgaacccaagaggtagaggttgcggtgagcccagatctcaccattgtactccagcctgggcaacaagagcaaaactccatctcaaaaataattaatttaatttaattaaaaaatcaatattattttactgagaacaagactgtgtgcctctactccatggaagtaactatggcaggcactgcagattggaacaagatgagcgggaaccccctgtcctcagggcagtggtgtcgccaatgaaatgggcctgatgccatgtttatagcgtgagctgctttcatttctccttccgtcaggggaacaggtttggctaagccagcgattctcagcctgggctgcaccttgttttgtttgtttgtttttgagtccgagtctcactctgtcgcccacgctagagtgcagtggcgtgatcttggctcactgcaagctccgcctcctgagttcacgccattctcctgcctcagcctccggagtagctgggactacagacgcctgccaccacgcccggctaattttttgtatttttagtagagacggggtttcaccttgttagccaggatgctctcgatctcctgacctcgtgatccgcccaccttggcctcccaaaatgctgggattacaggcgtgagccacctcgcctggccgggctgcaccttgttagctcctggtctgacttaagtggtcaggcatgcagccagggcattagtgaatgggcagccaagtgaagcagccccaacctaagctgagataagctcttgggccaactggggcatggaagggaggagggagtgtggggacttttgtatcagggaagtaaatgggccttccaggagaatggccagggctgtggtctctgtggctgtagatacaagccccagggaactgacagaaggaggagcggggagccctgcctctcagcaggcacctgcagaagtcacagccacaacctcaaacatcaggctgctctcagggtgaaaatgcttcccgcagcctaagataggtcctttattgtcagaaccaggaagccaggtgtggtagctcacacctgtaatcccaacactttgggaggccaaggtggaaaggggtggttgcgggggaagtgggtagcacttgaggccaggagttcaagaccagcctgggcaatatagtgagacctcatgtctacaaaaaataagcaaaattagccaggtgtggtgatgtgtgcctgtagtctcagctactcaggatgctgaggtgggaggatcacttgagcccaggaagcggcaactgtagtgagctataatcgcgccaccacactccagcctaggcggcagagtgagaccttgtatcaaaaagaaatcaaaaacaaaacaaaaaataactagggctacatggaaaggaaaagactccagtgaatacacacttgactacaaccagagtggccttcctgaccatgggaggtgagatgcacaactaccactgctacctagaaacagtctattgcaggggtccccaccccacccctgccatcataccgggtgcacagcaggcagtaagcgtcaggcaagcaagccagcgaagcttcatctgtattcccagctgctccccatgggtcgcattactgtttgagctttgcctcctgtcagatcagtggtggcattagattctcataggagtgtgaaccctactgtaaactgcacgtgtgccggatctaggttgctcgcttcttatgagaatctaatgcctgatgatctgtcactgtctcccatcacctccagatgggaccatccagttgcaagaaaacaagtgcacaattggctgggcacagtggctcacgcctgtaatcccagtactttgggaaactgaggcaggtggatcacgaggttaggaattcgagacaagcctgtccaagacggtgaaaccccgtctctactgaaaaatacaaaaattagccgggtgcggtggtgggtgcctgtaatcccagctactctggaggctaaggcaggagaattgcttgaacccaggaggcagaggttgcagtgagccgagatcgtgccactgcactctagcctgggtgacctgggtgacagagcaagactccatctcaaaaaaaaaaaaaaaagtgtacaatacatgtaacgtgcttgactcataccaaaaccatgtcccccacccccaatccattgaaaaatcgtcttccacaaaaccagtccctgatgccaaaaaggttggggaccactggtctattgcattttcaagcatagtcagataaataaaatgcattcttattttattagcaactcttttttttttttttttttttgagacatggtctcccctgtcacccaggttggagtgcagtggtgagatcacatctcattgcagccttaatctcctggcctcaagtgatcttcctgcctcagcctcctaagtatctgggactacaggcggcatgacaatgtccagctaactttttttaatttttaatagagatgaggccacactatgttgcctaggccggtctcaaactgagcttaagcgatctccctgactcagcctcccaaagtgctgagattacaggtgtgagccactgcacccagtggtttttttttttgtttgtttgtttgtttgtttgtttgttttgagacagagtctcactctgtcgcccaggctggagtgcagtggtgtgatctcggctcactgaaacctctgcctcccaggttcaagcgattctcctgcctcagcctcctgagaaggtggaactacaggtgcccaccaccatgcccggctgatttttgtatttttagtacagacaggatttcctcatgttggccaggctggtctcgaactcctgacctcaggtgatctgcccacctcggcctcccaaagtgctgggattacaggcatgagccactgcacctagtctattttataagcaactcttaaaagctcctgcagtgtgtgagttacagcagagacaactagtttcatctatttattttatgtgtttagcacttaattcacatgagcatacattgcaagacactcagctgtaacacatttttactatgctatgttcttacacattaaccagatttcattgattactcacaaccaacatttgtgagagcagctgtcttgtttccaagaattcctctctttctcaacattttctgtccatctttgctattgtgaggtttggtttccacattgaaatctcttttatctccaatctttcactagtatttcttctgtagtttttcagagttcttacataccttttctaccatttttgtacttctttttttgttttgttttgttttgttttttgagacagagtctcactctgtcacccaggctgaagtgcagtggcatgatctcggctcactgcaagctctgcctcccgggttcacgccattctcctgcctcagcctcctgagtagctgggactacaggcacccaccaccactcccggctaattttttgtatttttagtagagatggggtttcaccgtgttagccgggatggtctcgatctcctgacctcgtgatctgcccacctcggcctcccaaagtgctgggattacaggcgtaagccaccgcgcccagcccatttttgtacttcttaaaatattttacacaagtaaataaatacaaagaaaagattattcgattaggtgaaatagacaacacaattcttgtcaatattttaatgctctgtaataagttcaaaatggatggcatgttgaacattatttgatgtggaaactctaagcttaacttttcaaagattaaatcaaagctcagaaacatgcacagattttctcatcaatagtcactgcctatgtcaatctgggtcctccaggaagcagatgctgagatggagtgaagaggaaaagatttattggggggcaataattacaaaagataagggggcggatgacgtaggtctgtgaagggaaaacattccaagtgcaatgcagatctaatcatgtgaaaagaaagaggggaggaagaaaaatagggtagaatacagaattttcaaagcttccggcagcccaatgggggagtgaaccaaaatgcccagtggaagactcccacattgggcagaaatgatgaggctctggtacccctggccatgttcagccattggcttgggagctgcctgggaagagagagacctcagctcaaatgctgctactggctgaatgcggtggctcacctataatcccagcactttatttattttttttgtttgttttctttttctttttttttttttttttttgagacagtctcgctctgtcatccaggccagagtgcagtggcacgatcttggcttattgcaacctttacctcccagcttcaagcaattctcctgcctcagccttctgagtagctgggattttttttgcggggtgggggacggagtctcgctctgtcgcccaggctggaatgcagtggcacgacctcggctcactgcagcctccacctcccgggttccagtgattctcctgcctcagcctcctgggtagctgagattataggcacatgccaccatgcatggctaattttttgtttttttggttttttttttttttagtagagatggggtttcaccatgttggccaggctggtctcgaactcctgacctcaggtgatccacccgcctcagcctcccaaaatgctaggattaaaggggtgagccactgcgcctggcctaatttttgtatttttagtagagatagggtttcaccacgttggccaggctggtctcgaactcctagacctcaagtgatccatctgcctcagcctcccaaagttctgggattataggtgtaagccaccatgcccagcctaatcccagcactttagaaggctgaggtaggaggatcgcttgaggctaggagttcaagaccagcctgggcaaaatggtgagaactcatctctacaaaaaacaaatgctactatggaggaccccaaaggtgctgcagctgcacgctatctgctaacctcattccttgcagctgaatggcaagttcgttcttgaaaggagatcccagcaatgttcttccatggctcccatgctgcctcctcccatctgccaatgtaagcctttgtaagtgaaaaggcacagcctcctaaggttactaaatgcttgtctattcttggcctggagtgatcaagtgaataacatgcccagctgaactcggggaatgcaatcaaactttttttttttttttgagacggagtcttgctcttgttgcccaggctagagtgcaatggcgtgatctcagctcactgcaacctgcacctcccgggttcaagcgattctcctgcctcaccctcccaagtagctgggattacagatgcccaccaccatgcctggctaatttttgtatttttagtaaagacggggtttcaccatgttggccaggctggtcttgaactcctgacctcgtgatccccctgcctcggcttcccaaagtgctgggattacaggcgtgagccaccatgcctgaccaacaatgaaacattttacatagagatatagttgatgaacagtggtggaaacatgggtaacttgtttctttctgctttactttatatcccagatttttaaaaatgacctttttctttttgaagagaaaaatatataaaaaatatttttaaatcagtcaccataataacactttttaatctaaaattatattccccaacttagtagctcaacaaattgcttcctagagaaagaacatggtcaaggaccaagcagaggctttgcgttcagacagaccagagtttgaaccccagccctattactgcaaccctgcacactgggcaagcccttaccctctctcagcctcaattccttcctctggaagggaacttatgtgtcttccttcttcacactcctttattagaagatgcagtgtgggtaagccctctcattccattttgtgctgggagtttctaaaaatcaaatctacattcagaagacagacagtggccatagctgaagaaattcaaaataatgacctgggaaagtccccaaaatgagttctaaaaagctctttggcagcaattcctcttgcaggcatatgcccaaaataatggaaagcaaggactcaaatatctttgtacgcccatgttcttagcagcattattcccagtagccaaaaggtagaaacaatccaaatgtttattgacagatgaatggataaacaaaatatgatatgtacatacagtaaaatcgtatttggcctgagaaaggatgcatgttgacacacactagagcatagatggagcttgaggacattgcgccaagtgaaatgagccagacaaaaaaggacaaatggtatgattccatttacatgaggaacagcacatagtcaaattcatagagacagaaagtagaatagagattgccaaggactggggggaggaggaaaagggaagttagtgttggatgggtatcaagtttcagtttgggataagaaaagttatggagatgaacagtggtgacggtggtacaactatgcgaatgtacttaatgccactcaactgtacattttaaaatgattaaggctgtggttcacgcctataatgccagcactttgggaggccgaggcgggaggatcacgaggtcaagagattgagaccatcttggccaacatggtgaaaccccgtctctactaaaaatacaaaaattagctgggcgtgctggcgagcgcctgtagtcccagctactcaggaggctgaggcaggagaatcgcttgaacccaggaggcaagcttgcaatgagctgagatcttgccactgcactccagcctggtgacagattgagactgcatctaaaaaaaaaaaaattattaaaatgggccgggcatggtggttcacgcctgtaatcccagaagtttgggaggccgaggtgggcagatcacctgaggtcaagagttcaagatcagcctggctaacatggtgaaaccccgttgctactaaaaatagaaaaaaaattagccagacatggtggcgggcgcctgtaatctcagccactcgagaggctgaggcaagagaatcacttgaaccttggaggcagaggttgcagtgagctgggatcatgccactgcactccagtctgagcaacagagcaagactctgtctcaaaaaaaaaggggtgggggttaaaatggtacattttatgttatgtatattttaccaaaaatttttaaataattttttaaagcctccttgcaatgcagcattattattaatattattattattgagacagtgtctttctctgtcacccaggctgcagtgcagtggcacaatctcaacccactgcagcctccacctccccaggctcaagtgagcctcccacctcagcctcctgagtagctgggactgcaggcgcaagccaccacgtctggctaatttttgttgcttttcggttttgggaggggtgggttttggtagaagaacggtttctccatgttgcccaggttggtctcaaattcctgagctcaagtgatcctcctgccttggcctcctaaagtgctgggattacaggcataaaccactgcacctggtcacaacacaatattattatttgaaacacatgcaggaaataaagctgagctacaaaagatgtttctcatatagagaagcaacttgtgaaattcgttgcattttttataaattcaattataaaaataagaaagtcatatgatttggctctgtgtccccacccaaatctcaccttgaattgtactcccataattcccatgtgttgtgggagggacccagtgggagataattgaatcacggaggcagtttctcccatacagttcttgtggtagtgaataagtctcatgagatctgatggttttaaaaaggaggccaggcacagtggctcacacctgtaatcccaccactttgggaggccaaggcaggtggatcacctgaggtcaggaggtcaagaccagcctggccaacatggtgaaaccccatctctactaaaaatacaaaaattacctgggcatggtggcacatgcctattatcccagctacttgggaggctgaggcaggagaatcactcaaacccaggaggtggaggttgcagtgagccaagattgtgccactgcactccagcctgggtgacagagcaagactccatctcaaaaaagacaaaaaaaaggaatttccctgcacaagctctcttctcttctctgctgccatgtgagacgtgcctttcaccttccaccatcattgtgaggctcccccagccaagtggaactgtaagtccaataaactcttttgtaagttgcccagtctcaggtatgtctttatcagcagcatgaaaatggactcatacaagtcacatgacagaaaattttaaaaattaataaagaaccttataccttcatttcttccttacaagatgtttttaacctacttgtaatcatcacctataaaccctacgccttctgaagacaagtccccaaaatccagatgccccactggcaaggcacaggagcaaaatggacactgtgattcttctccagacattcagctgtgcttcccccagggtgggaagcctccaacactcttgtagatgtgaaggcagggcagccatggcatggtggtggtgggagaggaggcttggaaaagagaaagctaatggctgtctatgtttcctctatcctggtgtggggacattggtgcacccatgcacacgtgcacagtccctccatgctgaggctctattacctcccatggctccttcagaatggagtccaccaagaagaaggaactggttgttgaggcagccccaggcccttggcctgagaagcatctggctgatcgctgaggccccctgtgaggagcccaggaccaggtccctgggggaaaatgaggcagaactatggcctctagttcagtctcactcccatcaggatagcagagggcaagtctggaactgggcacattcaggtttgagtcttggtacagccttatgcaagtgacttcagttctcttgagcctcggtttccctagctttacaatgggaattctatttcctacctcttgatggtatgacaagggctgagagaaaaatctatatgaagtgctaaccagatggagtgtgtgctcactagatggaggctccatcagctacagccctcctaaggctccagaagcaacttcattgaaccaacccatgaacaaattctgagaacatttccaccatgaacctggttgtgaactcattagaagaactcactgaaatgggcagggtgtggtggcttgcacctgtaatcccagcaatttgggaggccgaggcaggcagatcacttgaggtcaggagttcaagaccagcctggccaacatggtgaaaccccatccctactaaaaatacaaaaattagccgggttttgtggtgggcacctgtaatcccagctactcgggaggctgaggcaggagaattccttgaacctaggaggtggaggttgcagtgagcagtgatggcaccactgcaccccagcctgggcgacagagcaagtctccatctcaaaaacaagaataaaagaaaaagaacttactgaaattattttaacattataaaggagggtgggtgcagtggctcacacctgtaatcctagcactttgggaggccgaggcaggaggatcacttgagcccaagagttcaagaccagcctgggcaacgtagtgggacactgtacctacaaaaaaaataaaaaaattagccagccatggtggcatgtacctgtggccccagctacaaagcaggctgaggcaggagaatcacctgagcccaggaggtggaggctgcagtaagccatgttcgtgccaccgcactccagcctgggtgacagagcaagatcctgtctcaaaaaaaaaaaaaaaaaaaaatttgcaaagaaacacttgaaagacttaataaaatgtttaaatatatatttccccaaactagattatcatcaatttcttaacaaataaattgatctggttggaagaacaaattctggaaattgcttcagatgatctcttgaaacaaaatatattgaacagaagtcacatgtatcagtgtgattagaaatttatttatttatttatttatttatttatttagagacagagtctcactctgtcactcaagctagagtgcagcggcacaatctcagctcactgcaacctccgcctcctgggttcaagtgattctcatgcctcagcctcccaagtagctgggattacaggcacgtaccaccatgctcagctaattgtttgtatttttagtgcagacgggagtttcaccatgttggccaggctggtttcaaactcctggcctcaagtgatccgcccacctccgcctcccaaagtgctgggattacaagcatgagccctcgtgccctgcctagaaatttatttttagtctctatgtagactgacacatagactccagaatgtcagtgtcttaacacaatagaaatgtatttctcactactgttaatttcagtggccctggtggacaggcagcttttctccacgtggggtttaagggacacaggctccttcctgtggctctactgtcccctggggcctctttatagccaatgtaaagataacaaacaagtggaaaagcttcattatgtcttaaaagttgacctaagagtcacacatatcacttccactcacatgtcattgatggttcctgaactagtcctattgccacagtaggaggcaagactaggagaaaatattacaaagcatatatctgacaaaatttttatatctaggatatataaagaactctggtaactcaataataagacagacaattgagttagaaaatgggcaagagaggctgggtgcggtggctcacacctgtaatcccagcactttgggaggccgaggcaagcaaatcacgaggtcaggagatagagaccatcctggctaacacagtgaaaccccgtctctactaaaaatacaaaaaattagcctggcgtggttgcgggtgcctgtagtcccagctactcgggaggctgaggcaggagaatggcatgaacccaggaggcagagcttgcagtgagccaagatcgtgccactgcactccaacctgggtgacagagcgagactctgtctcaaaaaaagaagagagaaaatgggcaagagatttgaacagacacttcaccaaagaagatatacagatggcaaataagctcatgagaagaggctcaacatcatttgttattaggtaaattcaaataaaccaccatgagataccacacacaccactagaatgactaacattaaaaatactatttcaagccaggtgcggtggctcacacctgtaatcccagcactttgggaggccgaagcgggtggatcacgaggtcagaagttcaagaccaacctggcaagatggtgaaaccccgtctttactaaaaatacaaaaagattagctgggtgtggtggcaggcacctgtaatctcagctacttgggagactgagacagagaattttttgaacccgagaggcagaggttgcagtgagccaagatcgcgccactgcactccagcctgggcaacagagtgagactccgtctcaaaaaataaataaactaataataataataataactattccaagtgttggcaatgatatggaaaaactggaactttcatatgatgctggtgggaatgtaaaatgatgcaacctctttagaaaacagtttggaagttttcttatatataagatgtttaactttttaaagtgatataaatcactgcacccatctattttagaatatacatttcccagaaatacatagaatacttaagaaatttaattacattcaggtctcaacaaatttcaaaggactggtatactggtatcctatagaccactttctccaacaacaattaaaaatgcagaaatctaatttaatggtgaagcattgaatactctccctttgagaccaaagaaaagagtgcctgcttataacatttttattcaatatcatattggatgaagagaagaataataaaggcataagaattagaaaagaataaaatattcgttattcatgtatatgattgggctacatagaaaacacaaaaatctataaagaaattattagctttaataaaaaagtttagcaagttgctgaataaaaaaattaatatacaacagtcaatgaatttctacaaccagcatcaaattacaaaagtaatttttaaaaagataatcatcggttgggcatagtaacacatgctgttgtctttactcaggaggctgaggtgggaagattgcttaagcccaggaatttgagtacagcctgggcagcatacaaagaccccatcccttgaaaataaaaaaaaaagatagtcatgctaaaaagataaactgaaatgaataaatctaacaaaagtgatttatggagaaaattataaaatccttttgaaaatcattaaagaaacctaaataaatggggagcttcctggatatcttttaattttaatatactttcttctaaaatattcaaaattaaagctaggcatggtggttaacgcctgtaatcccagcactttgggaggccgaggcaggtggatcatgtgaggtcaggagttcaagaccagtctagccaacatggtgaaaccccatctctactaaaaatacaaaaattagccaagcatggcgatgcacacctgtaatcccagttactggggaggctgaggcaggagaatcacttgaacccaggaggcagaggtgcagtgagccaagattgtgccattgcactccagcctgggagacaaaagcggaattccatcttgaaaaaataaaataaaatgaaatattcaaaattaacttttgaaaacacatattaaaacaattttaagtttttatgtttttattatattcattcaaacatcactggtccatttacagaacatccagacacaactatgattaagtttggtcatgttgattatctttccaatttcagtaatgtgaattacagaactttatatattgtttcttttttttttttttttgagacagggtcttgctctgttgcccaggctagagtgccatggtgtgatcatagctcactgcagccttgaccttgtaggctcaagcaatcctcccacctcagcctctttgagtagctgggaccacaagtgcacaccacgatgcccaactaatttttcaattttttgcagagacaaggtctcgctatattcatcaggcctcaaactcctgggctgaagcgatctgcctaccttggcctcccaaagtgctgggattacaggcatgcaccactgcgccccgcctagctaacgagtttggggttcatcatcccattcattttaagggcgaaggagtgacatgaaaagcacagccttaagcttcatttgtctcctctgtgccaggtgaatggagggggcacaactaggggcagggtgacagtgggccagtgaggaagtgcccagcatgcaatgatctggccttatggcaggctgttggcagtcaagataggaaagaaaggatggttacaagagctgggaaaagatggatggaatgggctcacagctggttgcctagttgagggaaactagttaagataaagactagaggccaggcctggtggctcacacctgtaatcctagcactttgggaggccgaggtgggctgatcacttgtggtcaagagtttgagaccagcctggccaacatggtgaaactctgtctctactaaaaatacaaagattagccagacgtggtggcaggcacctgtaattccagctactagggaggctgagatgtgagaatcacttgaacccaagaggcagagattgcagtgagccaaggtctcaccactgcactccagcctgggcaacagagcaagactctgtctcaaaaataaataaataaataaagactcggaataatactagggtactgccacaaaggcattgtagcctttacaaatgatagttataggcttccctggtcacactgcctatgggtagccctgctccagaaggagcagttagaaaaaaaaatgatagttacaagaactacatagcaatatgactgggcgtggtggctcatgcctgtaatcccagcacgtcagggggccgaggtgggcagatcacttgaggtcaggagctcgagaccaacctggccaacatggtgaaaacccgtctctactaaaaacacaaaaattagccagcatggtggcatgcacctgtaatcccagctgcttggcaggctgaggcaggagaatcgactgaacctgggaggtggaggttgcactgagccaagatcgtgccactgcactctagcctgggcaacagagtgagactccatctcaaaagaaaaaaaaatgctacatagcaatatgggaaaatgcttataatatactaataaatgaaaagaagagagttttttaaatcacatgtacctatggttacaaatatctttttaagacatgagagaaaaataaactcaaacaaattaatcattctaccccaaaaatgtattcctactttgttagtgtcagggttgaattgtgtctccccacaaatttatatgttgaagcactaaccactaacgtaactgcatttggagagaccacctttaaggaggtacatgagggttaatgaggtcatagggatggggccctaatcccacagaactggtgtacttataagaagaggaagagacaccagtgatctctctccacacaagcagtgagaaaaggccatatgaggacacagtgacaaggcaccacgtgcaacctgaggcgtcagcagaaaccaaccctgccggcaccttaatgttggactttccaagccttcagaaccatgagaaaatgaatttctatgattcaagccacctagtctgtggtattttgtgatggcaggctaagccaactaatacagctagccagccagtcaccaagtcctaccaattattccactgcaattctccttgcaaccattcctcaccattccgcaccgttccactgccaacctggctcaagatcgtcttgtgctcagatgaatacaatagactcctttctcttccctgcctttatacttcctgacttgcttctcatattcccagcaccagttcttatcttgcctcatcctatcatttcaaacgtctgagatgtttgaatctgacaagggatattttctcctagtaccaacccttggttccctctctctggaattcgctgtgctcatctcagacgtgaagttctctggcctcccctggtgcaccagagttcttccattataagtgcagaaggaaatccaggtcgatgagcactcagatgactagcataaagaccatccctttccccctgtcctgcctcgcctgtgtgtcttttcttagtttcatattcccaggcttctactgcaggcagctttttccacatggaggaaaagagaccagccaggcacggtggcacatgcctgtaatcccaacactttgagaggccgaggcgggtggatggcttgagctcaggagttcgagaccagcctgggcaacatggtgaaaccctgtctctaccaaaaaaaagaatacagaaattagctgggcatggtggcacacacctgtagtcccagctgcttgggaggctaaggtgggaggatcacttgagcctgggaggtagaggtggcagtgggctgtgatcatgccactgcactccagcctgggtgacagagccagatcctgtctcaaaaaaaaaaaaaagagggagaccaccaagagcttaggcctaaatcatcccccattaccaagcttcatgggaaatctaagtttctttctctcagcatacgtatgtcaaatctcaggaaggactgactggtcattcttgggtcatacccacccatgagtcagtcatgctagccaagaagaaaggggattctggtaggtcagggctagctcatgacacagtagttcgaaaggaagaaagacacccctctcaagagaagaggaaagagatgtcgagcagatataaacaagtatctgttctttcaggtaacacccattctgatgcagcccagcacacaagacccttcccagtgtcacccttgctgactttgccacgtcccattgagagtgaatcagacagtaccttcctaggcagagtgccgccccacacctccatggacataggtaatctattccaattggtaatacagttgagaagcatttgagcacttgttggaacaatggcaatctttttttttttctgtaatgattcatacaaacttggccatgggactttacaaaggaaggaaaatagacatcaacatttctgatgcagaactcctaagttcttccagaataaagtcaggcctcaatttgacaggaaggatttgttttgcaatacaaacctggctttgaaggttaggttaatactggattagaggacagaataaatctacagaagctacatcctgggagatttttttttaaatatggtaaagccaatgctggcaatggaaagggaattgagtacacatgtacgtcgttggtggagttgtaaagcagtataagcctttccaagagcgatttggcaatcgtgtctttaaaagtccaataccatttgatgggctaatttcatttctaagcatctgttctaagaaaatgggctgggcacagtggctcacgcctgtaatcggagcactttggaaggctgaggcaggtggattgcctgaggtcaggagttttgagaccagcctggctaacatggtgaaaccccatctctaccaaaaatacaaaaatgagccagaagtggttgcgcacacctgtagtcccagctacttgggaggctgaggcaggagaatcgcttgaacttgggagatggaggttgcagtgagctgagattgtgccactgcgctccagcctgggtgtcagcaaaactccgtctccaaaaaaaagaaaacgatccaggccaagatgggtggatcacctgaggtcaggagttcgagaccagcctggccaacatggtgaaaccccatctctactaaaaatacaaaattagctgggtgtggtggtgcacgcctgcagtcccagctactcgggaggcagagacaggagaattgcttgaacctgggaggcagagattgcagtgagtcgagactgtgccactgcattccagcctgggtgagtcagagtgagactccgtctaaaaaaaaaaaaaagaaagaaaaagaaaatgatccaaaaaaacagaagcagacagaagatatatgcaaaaagatgacactaggtattattgataacagtgaaagttttgaaacaacataaaagaattattagatacactttggtaaatctccacgggctatttctcagcagttaaaaatgatgtctagtcagttcacagaaatcaaaatgtaagtggctttgaaagattattcagcctttttttttttttccgagatggagtcttgctctgttgcccaggctggagtgcagtggcgcgatctcagctcactgcaacctccacctcctgaattcaagcagttctctggcctcagcctcctgattagctgggattacagggcacgtgccaccaaacctggctaattttttttttttttttgagatggagtctcactctgttgcccaggctggagtgcagtggctctgtcacccaggctggagtgcagtggcatgatctctgcaacacctcctgggttcacaccatcctcctgcctcagcctcccgagtagctgggactacagctgcccgccaccatgcccagctaatttttttgtatttttagtagagacggggtttcactgcgttagccaggaatgtctcgatctcctgacctcatgatctacctgccttagcctcccagagtgctgggattaccggcatgagccactgcacccagcgacgcctggctaatttttgtatttttagtagagacggggttttgccatgttgtccaggctggtcttgaactcctgacctcatgatccacccacctcggcctcccaaagtgctgggattacaggcgtgagccaccgtgcccagcctattcagcctttcctataagaaaaacttatattaaaacaaaacgggaataccatttttacctttcagtttgtcaaagatcaaagatgttgtttaccctctgctggtatggagaaacaggcacttttatacattattgggtagagtttgaaggcaatctgatagtgtcttccaaaataaaatgtacattttaaaatgcatttgctgacctagcaaaatttcagtgctaggaatttatcctacagagactactcacacacgtgcctaaagggcaagactgctgcttgcaacatagtctatagaaacaaaagcaaggactggataatacattatggtacatccacacaatatatactattaactattaaaaagaaagtccatgttaaaaccgtatgtgctgttatgggatggtgtccaaaatatattaagtgagaaagacaagaaagcaaagtgcaaagcaagatgaatggtattccaatctttatttgtgtagaaaagctcgcttctgtttgtatttgcatagaacatctctggatccacaaggaaatggtgaccacaggactgtggggaggattactgaagccaagggtggaaaggagacttttcattgttctttctgcactatttgaattttttaaaatcataggtattttctttccaaaaagaaaataaaaaataacaaaatacgtgggctgtcaaaaggatatctatatatgcttataattatataaatacctgtattgttatgttaaatggaaaaagataaattgaaaattgtttatatagtatagtcacagctatacgaaaggagaaaaatgtttggagaaaaaacattggaagggggctgggcgaggtggctcacacctgtaaccccagcactttgggaggccaaggcaggtggatcactagaggctaggagttcgagaccagcctggccaccatggtgaaaccccatctgtactaaaaatacaaaaattagtcaggtgtggtggcatgcacctgtaatctcagctactcgggaggctgaggcaagagaatcactcgaacccaggaggcagagattgcagtgagccgagattgtgccactgcactccagcctgggcaacaaagcgagactctgtttcaaaaaacaaacaaaaaaaattggaagaaaatgaggatatgtgccaaaatgttagccttgggatgatcagtgattgcatatctttcaactttttctatagtttcaacatgtctttactaatcacattttactcttttttttttttttttttgagtcagggtcttgctctgtcgcccaggctggagtacagtggcacaaacacagctcactgcaacctctgcctcccaggctcaagctgtcctcccatctcagcccccaagtatctaggactacaggcacacaccaccgcacccagctaatttttgaattttttgtagagaaggggttttgccatattgtccaggcttgcacattttactcttgtaatagaaaaaaataaactttttaaaaattatgttaaattaaaatataacatccatccacctttatagttcaattgcagatggtaaaaatcagggggaagaaaaagttaatagtctgctcaagatctttttcaacaccatgattctgcactaatgaagtttgttgtagtttctcaactccttttaacttttttctggtttggcaactgatgctgataaagacaagacatagcacataagtcagccccccccaaaaaaaaactgtatttataatacccaataccaataaatatgcagctggatgagcatttacaggcatgactacactgcaaattgataccacccttttggaaagcaatttggctatacgaatctgaagctataaaaagtgtttacaccgtctgacccagtaacttgacttctggaatccatcctcaggaaaaaacgggaaatgctggagagctttattcataaaggtcataattaaggatggtatgcagccataaaaaaaatcacaattgccaataacatgtagccacatggggtaacatttatgatatgccgctaagtagaagaaaaagaatacaaaactgcgtatatcctgtaattacgaccacttaataaaatgcatgtggaaaccctggaaggaagtgcagcagcatgcttgctcacagtgcttacattcaggtggtgggatcgtgagtgagtttttccccctccttttctcttctccaaaatgtttatcatgtattcttttttaaaagaataatgtttataaaaacttgaatatgtgaagtctggactgttccacaggaaatgagtcttctctatgtcccctgtctatatcctttgagaaaaaaaagtaagtccttgcatctcatataataataacattcactaatatttattgagcaactctgtaccctttacatattttagatcaatgagccaaatgaagtaaaaatccttactaccattttgcaaatgggaaactgaggcccagacaggctaaatgacacaactcagaggtgacagcatcagaactgaaacccaggtccaccacatcacaataagcacccaaaacagttcttggggtcctgggtgtgccaggaagggtgctaacactctgtgcacattttctcattcaataatcctgtagatgtagatggtatcctcattttacaatggggaaacagcagctaagggaagtcatgttaccagtactagatgccaaagttagtcagaagtcgaactgggattcgaacccaggttggtctgtgttggtagccactatgctgtcgtggttaccaagacaaggaaaacccagaaactctgagcctgggacacagggaaccatccctggtgcaggcaccatcagaaaaaggagcatctgggccagccacagtggctcatgcctatcatcccagctctttggaaggccgaagtgggaagattgctcgaggccaggagtttgagaccaccctgggaaacatagtgagaccctcatctttacaaataaataaatttttttaaaaaaataggagcatctgataggaaggtgaaggcaaaaggagtgggctctggggctgtcctgaactgggtggggcctggctctgtgcacacccgtgcacctgacgcctggggccggatgagctggctctgtgcagagacgtccatgtggcctggcctagggccagcacagatgtcacgtcctcctgccagtactgacagttctggtgttcaccaaccaaaaggcctcaaaaaaaaccatgaaagccctcttaaggattcctggttctcagggcaggaagaaggcaaggggatgggaagacactgtctcctgcatgatggaaaattccagtgccaccttgcttgggtctaacttccttgaccactctggagacacagagccctaccaggacccagaatctggagccaaggctggagctctgtgcccggacccagggctggagccaacaacacaagcacgggcttaaacgctcagggaagccggaagtccaagtgactaagctagagatactcaggccagaggccaagtaaggcctgagcgctgagtacggccaatggcctctgagatgtcgacatagctgaggtgaaagacagaccagcaccaaagacggctctgaggatatggaggggtgaggaccctcatacatgactggtgggagtggagacggacccaagcctttggaaaacagtttggtatcacctggaacacatactctatgatccagtaaatccactcttcataagacagctggagaaactctcccacccatgggccgcagaatgttcttagcagcactgcttataaaggcaaaaactgcaaacagcccaaacccccacggccatgagaatggattaaaaaatacagaccatattcatacaatgaaatactgtatagtggtgaaaatgaataagctaaactgaatgaatgaatcccataaacacaatgttgactgaaagaggcaaatcataacataatgtgcattgtgacctcactcaatagaagcccaacaatctctccagactaaacaacatattgacgtatggggcatatgcctatgtggtaaaaccacagagaaaagagaatgacagacacaaaattcaggatggtgatgacctgccagggacaaggggaaaaggtgggacttaaggggaagggagcacccagggaggtttagaaagtattgaaaacatggaattgttcggttaggtgctgggaacatgggcatttattttcattattatccttcaaactgaccccatgcgttatatacactcatgtatgtataaaatgtttcaaattgtttaaaattaagaaaagtttttaaagaccaggcacagtggctcacacctataatcccagcactttgggagacctaggtgggaagattgcttcggcccaagagttcaagaccagcctgggcaacatggcgaaacaccatctctatgaaaaatacaaaaattagctggatgtggtggcatgcgcttgtagtcccagagactcaggaggatcacttgagccagggaagttgaggctgcactgagccatgatcatgccactgcactctagcctgggtgacagagggagaccctctctgataaataaataaataaatatttaagaaaaatctcggtggagagctactgcctgctccatggaggtggcccagcacccagcacctgcctggctccgacccacccaactgactgtgaatggtccaagaggagggtagggacaccagctctggttggcctgcataaaaggagtgtggaggagaaggtgcaagtctaaatcagaaggataagttcaaatcccatctttgccatttattggctatatgaccctgggcaagtaactaaaactctctgagagtcaagtcctcatctgcaaaatgagcacaagctaagaacctaggctttgtttatgaattcctagcacttagcatcttacttggcagacagtaaaaaatagacatcaagcatcggtcttgtcgtgagaaaaacagacaaattccaatagtgggaaatcttacaaaatatctgaccagcactcctcaaaactatcaatttcaacaaacaaaagaagaaaaagagaacaaatctgcaatgattccacttatataggatacctaaaatagtcaaagacagcagaaagaggcatgcttaccatgggaggggcaggaggaaacaggagtgtttgatgggtaccaagtttcaatttgagatgatgaaaaagttctggagatggatgtggtgatggctctacacaacatgaatgtgccactgaactctacacttaaaaattgttaaaatggtaaattttatgttatacatgttttacccgattttttttttttttttttttgagagagggtcttgctctgtcaccctggctggagtgcagtggcaccatctcagttcactgcaacctccacctcccatgttcaagtgattctcatgtctcagcctcccaagtagctgggattacaggcacgtgccaccacgcatgactaatttttgtatttttattagagacagggtttcgccctgttggccaggctggtctcgaactcctgacctaaagtgatccacccgcctcggcctcccaaagtgctgggatttcaggtataagccaccacacccggcctaaattttaaaaatcaaacaaaacaaaataaccaattaaaaaaagtctgagaagccaccacaggaggctaaagggatacaacaaattgtaatgaggtatcctggacaggatcctgaaagtgaaaagagaccaggtaaaatgtaaggaaatctaaataaaccatggacttcagttaatcataatgtatcattcttggtgcattaattataacaaatgtattatactaatgtaagatattaataataggggaaattggtgtagggtatatgggaactctgtgtggtggtttctcagacttttcttcattgttttgtctgaatttttttcttttttttgagacagggtcttggtctgttgcccaggctggagtccagtggcacaatcacggttcactgcagtctcaggctcaagcaaacctcccatgtcagcctcccaagtaactgtgactacaggtacatgccaccacgcccagctaatgtttttattttttgtagagatggggtctcactatgttgccctggctggtctcaaactcctgggctcaagcaatcctcctgcctcagcctcctgaagtgctaggattatagacatgagccactgtgcctagctttttgtctgatttttgaaaacaatggtaaaacatatgtaacataaaattttccgttttaaccactttcaagtgtacagttccgggcattacgtacattcacatcgttgtggagctatcttctcaatttttctgaaaatctaaaaatctattcattaaaattatatatgaatatatatcattttttttgagacaatgtctcactctgttgctcaggctggagtgcagtggtgtgatctcagctcactgcaacctctgcctcctaggctcaagagatcctcccacctcagcctcctgagtagctgagattacaggtgcacgccaccatgcccctctaatttttgtatttttagtagagacgaggtttcaccatgtcggccaggctgacctcaaacgcctgacctcaagtcatccgcctgcctcagcctcccaaagtgctgggattacaggcatgagttaccatgcccagcctaatatatataattttaataaatatattttactttagattttcagaaaaaatcatttaaattatatatgcttaataattttataattcattcattaaatattcacatttattaaaattcatattcattaaaattatatatgtatataatatataaaattatatatggatatatggatataattttaatgaatacattgtatttatatattattattttatatatacatatatttcaaatgaaagctaaaagagactaaagactaaagaactaaggggagggccaggcacggtggctcatgcctgtaatcccagcactttgggaagctgaggtggatggatcacctgaggtcaggagttcgagaccagccttgccaatgtggtgaaactccgtcactactaaaaatacaaaaattaggaaggcgtggtggctcatgcttgtaatcccagctacttgggtggctggggcaggagaattgcttgaatccaggaggtggaggttgcagtgagccgaaatcgcaccactgtactccagcctgggcgacgagtgaaactccgctcaaaaaaaaaagaaagagaaaacaaaataaaacaaaactaaggggaggagcaggggggtggggggatgttgggtgaaactctttggccaggccctgagcctgagttccaggggcctgggttacaaggctccctgcccagtgacagaccctcacccacagacttaccatgcccatactcttgtccccacccacccatgaacagtggcctttgtctcatgcatgatgtcagctcttctctgcttctctcaagatcttggaggaattaattagttgttctttattttctatttgttacctttgatattctatatctgccatctcttctcctgaaccagggcctggtaggtcactgagaaaatacaaaatggccacctgaactgggagattttgcctcgcacagtcacgagctccattaaaacagagaaacactaaccctaacttacaatcaccgaacccatgaggtcaccctatctcccagccctccttcaccaggtaagaaactgaggcccaggggtccacgtgacttgtctaagatcacagctgttgagactgagctgggatggggacccggggctcctgagacctgcctggcattttctcctgtaacatgctgccttcctaaagcggtatttaatggacttctgtttctggcaatggaacagactgggcgctctgtttcctgctgaaaacattaacaatgctgggtaaaatgttttcagtcctataaaggcaccaaatgagctcgcaaaagggttgaacataggaataggccaagaaagaagagaaagcaggaacccagagaggatgtggaagctggctttctccctgaggaaatggaccaaagccaagcgatcctgagcttcaactcttaatcccccatagagtgcacgaaagaggaaacaaaccccagcccatcaagctggagatggaacaggagagcccgcctataaagctgggccacatctccagtacaaataagggcaggctagaaatagacacatgtcccacaaaagagcaaggaaaatggcccatgtcaaactttgaaaatatatggaaagaaaaacatgtttacccttatgtaaaccacaagccagcccttatgtttaaattcacagatacaggcagaaaccctcaagccagctgagcaaggctttacggaggcaagggagttagccataagactatctgtggttgagcattccaggcaggcagcagcaagagccaccacgaaggccagaaggcagggtcatgcctggctcgctccagcaacacgaaaaaggggtggagtgtggagagccaagcaaaaaagatgaagtcacataagtagcagaagacccggttgtacaaggcctggtgtgccaccgtaaaaacatggactcctcctcggaaatatggagccactgggggagtttgagcaggggaagaagatctaacaaagaactttcacacttcctgtgggagtgcaaattggtacaatcttatatagcaaaacgatcaccctggcttctctgctaagaatacatgaatggaacaaagaccaaataggaagctattccagtaatccaggtgaaaattaatagtggctctggcaaggatggtaggtagcaagagaaggatgagattgtattgggatgtgttgaaaggcagaaacaaatcgattcctgacactggatttaaggtatgaaaaaaggggggccaggcacgctgggccacacctgtaatcccagtgtgtccaaaattggttccttctggtgggttcttggtctggctgacttcaagaatgaagccacagaccctcgcggtgagtggcacagttcttgatgtatctggagtttgttccttcagatgtgtccccagttttttccttctggtggattcgtggtcttgctgacttcaggaatgaagccgctgaccttcgcagtgagtgttacagctcttaaaggtggcgtatccagagttgtttgttcctccggatgggttcgtggtcccgctgacttcaggagtgaagcacagacctacatagtgagtgttacagctcttaaaggtggcgcgtttagtgtcacagctcttaaaggtggcatgtctggagttgtttctcccagtgggttcgtggtctcactcactttaggagtgaagctgcagacctcctcagtgagtgttccagctcataaaagtagtgcgaagccaaagcgtgagcaacagcaagattttttttttttttttttgagacggagtctcgctctgtggtccaggctggagtgcagtggaggaatctgggctcactgcaagctccgcctcctgggttcacgccactctcctgcctcagccttctgagtagctgggactacaggtgcccaccaccacacccggctaattcttttttgtatttttagtagagacagagtttcaccttgttagccaccatggtctccatctcccgacctcatgatctgcctgtctcggcctcccaaagtactgagattacagagcaacagcaagatttattccgaagagcaaaggaactaagccttcacaccacataagaggacccaccgggttgctgctgggggtctctggtggccagcttttattcccttatttggccccgcccacattctgctgattggttcattttacagagcgctgattggtccattttacagagcgctgattggcccgtttttacagagtgctgactggtgcatttacaaacctttagctagacacagagctaactggtgtgtttacgatcctttagctagatataaaaattctccaattccccccacctgatccagaagcccagctggcttcacctctctccagcattttgggaggccgaggcaggaggattgcctgaggttggcagttcaagaccagcctgaccaacatggaaaaaccccatctctactaaaaatacaaaattaggacgggagcagtggctcacgcctgtaatcccagcactttgggaggctgaggcaggtggatcacaaggtcaggagattgagaccatcctagctaacacagggaaaccccctctctactaaaaataccaaaaaaaaaaaattagccgggcgtggtggcacgcgcctgtagtcccagctgttcgggaggctggggcaggagaatggcatgaacccggcaggcggaggttgcagtgagccgagatcacaccactgcactccagcctgggcgacagagcaagactccatctcaaaaaaaaaaaaaatacaaaattagccaggcatggtggcacatgcctgtaatcccagctactcaagaggctgaagcaggagaatcactttaacccggaaggcagaggtttcggttagccaagataatcatgccattgcactccagcctgggcaacagagcaagactccgtctcaaaaaaaaagaaaagaaggtacattttagacttgctgaatttgaggggttttttttgttttttgtttgttttttgttttgttttgttttgagacggagtattactctgttgcccaggctggagtgcagtggcgcaatctcggctcactcacggcaacctctgtccctcaggttcaagcgattctcctgcctcagcctcccgagtagtgggattgcaggcacctgccactgcacctagctaatttttgtatttttagtagagacggggtttcaccatcttggccaggctggtcttgaactcctgacttcatgatccacccgcctcggcctcccaaagtgctgggattacaggcgtaagccaccacgcctggccaaatttgagctattaaacattcaaggcgaaatgccaagtcagcagttagatatatggaattgactgggcacagtggcatatgcctgtaatcccagcattttaggaggccaaggcacgaggatcattcaagctcaggagttcaagaccagtcggggccatacagcaaaaccctgtctctacaaaaaaaattcaaaaattagctgggcatgatggcatgagtctagtccctgtagctattcagaaggctgaggtgggaggattgtttgagcctgagaggtcaaggcttcagtgagctgtgatcatgccactgcactccagcctgggtgacacactgaaacccagtctcaaaaaataaaaataaaaaaatatatatatggaattaaggagagaattccaggctacagatgtaaatttgggaaatgtcagcatacggatggtatttaaagccatgaggctgcaggagctcaccagcagagtgaatatagagaagagagttaaaggctgagccctgaagcaccgccaacagagagaggtcagagagaagagaaaccagaagagggggtgaagaggggaagccactgtggttaaaggaaaaccgagagagtatggggccctggaagccacactgagagaactgagacaaggaggagatatgcaaggctgttcagtgagcgcaagctaagaacctaggctttgctgggcacgctggcttacaactgtaatcctcgcactttgggaggccaaggcgggtggatcacctgaagtcaggagttcaagaccaacctggccaacatggtgaaaccctgtttctactgaaaaaaaaaaaaaaaaaagagccagccatggtggtgcgcgcctgtggtctcagctattcgggaggctgaggcaggagaatcacttggaactgggagttcagtgagcccaggagcccagatggcaccactacactccagcctgagcaacagactgagactccgtctcaaaaataaaaagaaaagaggctttatctctgaaacaggactgagcatcatatttagcacacagtaatagacatcaaatatccagtcttgcggtgagaaaagcagatgaaatcccaatagcaggctatcctacaaaatacctgactagcactcctcaaaactgtcaaggtggtgggtcaaacgagacgatgactgagcactgaccattggcaagagcagtcttggtggaatggaagaggtgagagtcggcctcaagtaaacttagaaaattgccagccatcagattttttaaaattaaaaaaaaaaaaaaactgaaatactgtgtgttgacaaagatgtggagcaactggaactttcacacacttttttttttttttttgagacagagtcttgttctgtggcccaggctggagtgcagtggcacaatttcagctcactgcaacctctgcctcccaggttcaagcaactgtcatgcctcagcctcccgaggagctaggattacaggtgcccaccaccatgcctggctaatttttgtatttttagtagagacagggtttcaccatgttggccaggctggtcctgaactcctagcctcaagtgatctgcctgcctcagcctcccaaagtgttgggattacaggcgtaagccactgcacccggcccacacactttttttttttttgagacagaatcttgctctgtcacccaggctggagtgcaatggtgcgatcttggctcactgccatctctgcctcccaggtacaagcgattctcctgccccagcctcctgagtagctgggattacaggcgcctgccaccacgcctgactaatttttgtatttttagtagagatggggtttcaccatgttggccaggttggtctcaaactcctgacctcgtgatccacctgcctcagcctcccaaagtgctaggattacaggcatgagccaccacacccggctgcccacactcttcttatgggagtgaaaatcggttcaatcttaagagaaccctttggcagtatctactaaaactgaacatgtttataatctatgacccagcaattcccttcctaggtatatatctaatagcaatccatacatatgttcaccagatagtagtgaacaaaaacattcatagcattcttcataataaccgcaaactggaaattatccatcaaaaatagattagtaaatggtaatatattcacataatgatgtattaccctgcaatgaaactgagaaaactactgctatctgcaataacgtggatgaatctcacattagagagtataatattgatgcaggagaaaagaggcaggttaatggctacagacagacagttaggaaaaggtgtaagttctgttgtttgacagcaaagcaaagtgactatagttaacaactgtctattgtctttttttttttttttttttggagacagggtctcgctctgtcacccagctggagtgcggtggcacaatcacagctcactgcagtctcaatttcccagcctcaaccaatcctcccactcagcctcctgagcagttgggactacaggcacacaccaccacgcccagctaatttttttttttgtagagatgggtttttgccatgttgttcaggctggcctcgaactcctgacctcctgatctcatattagggagtataatattgtcctctcttctagctactttggaatacacaatagagaccagttgtggtggctcacacgtgtaatcctagcgttttgggagcccgaggcaggtggatcacttgagctcaggagtttgagaccagcctgggcatcatggcaaaaacccatctctacaaaaaataaaaataaataaataaacaaaatgtggtatagccatgtgatggaatattattcagccataaaaaagaatgaaatattgaggctaggtgtggtggttcacgcctgtaatcccagcactttgggaggccaagggaggcaggtcacttgaggtcaggagttcaagaccagcctggacaacatggtgaaaccccatcccttctgaaaatacaaaaaaaaactagccgggcttggtggcaggcaccagtaatcccagctactcagggaggctgaggcaagagaattggttgaacccaggaggttgccttgagctgagattgcaccactgcactctatccagcctgggcgacagagcaagactccatctcaaaaaaaaaaaaagaagaagaagaagaagaatgaagtattgatacatgctacaacatgaatgaaccttgaaaatattatgcagagtgaaagaagccagacacaaaaggccacatattacatattacatgattccatttataggaaatatccagaatggtaggtccatagagataaaaaacagatgagtggttgccaggggctgaggccaatggggaatggagagtgactgctaatggatatgggcttcccttttgaagtgatgaaaatgtcctttgactagggagtggtcatgggtgctcaatactgtgaatgtactaaatgccgctgagttgtgcattttaaaatggttaaaatggtaacgtttatgtgtattttacaataaagtaagataaaatgaatccatggtgtaataaatcaggatagtagttatcttagagtataaagaagtgtaagtgatggggaggggggctggatttctggggaactggtagtattttttaaaatctgggtggtccttccttaggtacattcattttgtaaagattcattgagccataagagacaatgaatagagatgattctttcaaggagttttgctgcagagtggagctgtgaacgtgggcagcagctagagggagagtggaatcaagggagggtggttttaagatggaagaaatgatactgtttttgtgtatgtgagagtaatctagtagagagacggaaatgggtggtgtgggaaagatgagagaattgcttgagcagtccttgagcaacgtgagaggataaggcctcacgcctaagaggggagatactcgactggccatcgagaggaccagcaggaggcggaggcacagggctgcctgtggtggcaggtcggtagagcagtgggcatctgtggcagctcacttctggtttggtaccaagattattacccccaaattaccgacgcacaatcttagactcaaggagagaaggggtttgctcaccatcacacagctgaagccagaagtggagccaagctctcccggattccaggtgcactacaccaaactgcccgagtgccttgagctcagctccaccatggaacatggcgctttctattgtttgccctaaaacaacttctcaaactttcagaagtgcctctctttatatagattatacacacacacacacgcacaccatatatgtgtgtatatatatacatatatacatgtatatgtgtgtatatatatatacactatatatatgtgtgtgtatatatatggtgtgtgtatatgtgcgtgtatatatatatatatggtgtgtgtgtgtgtgtgtatatatagtggctgtgctgctatatttggctactatatatatatatatatgataaggattctggaattgggtgagtctggcccaccttgtggatatgctgtaccatagaaaaggatttagttacactccctgctcagcctccatctttcctggctggagaactctaattgcagagcttgccctcatggtaaaagcccttcatcactccattgtctggcccttttccagtcctattacatctttcttggaatgcagaagccatacaacagaaaccacagtggcttccattttgaagagccttttgcagggacaagggcccatttatatattcaaactgatggtcagcaaagctgtggttttcccacggtcacacggagtgtccacaatagagcccaaccaagaagaattccaatctccatcacaccccactgcctgcatgcaggactccaggtgggcacggtgtatcagtagggcacattcagcagctggtgatgggggcgtggcagattgtgttgaagtggcttaaagcactaaggaggatttattgagttatataacgtgaagccctgaagcagtcagtcttctggattggttgataggggctcaatggtgtcatcacagtcccaattttgtcctactttgccatccacaaaggccatagtaggttggatggcaccctgatacagtttggctgtgtccccacccaaatctcatcttgaattgtagttcccataatccccacgtaccatgaaagggacccggtggaaggtgatttaatcatgggggcagttaccctcatgctgttctcatgatagtgagttctcacaagatctgatggttttataaggggctttttcccctttttgctcggcacttctccttcctgcagccatgtgaaggagtgtttgcttccccttccaccatgactgtaagtttcctgaagcctccccagccctgcacaatggtgaatcaattaaacctctttccttataaactacccagtgtccagcagttctttttagcagtgtgagaagggactaacacaacccctcccaaaattatgtctacttcctaacccctggaacctgtgaatgtgacctgatttggaaaaagcatttttccaagtgtaattaagagtcttgagattaaatccttctggattacccaagtgggccctaaatccagtgacaagtatccttgtaagagatagagaaggctgggcacagtggctcatgcctgtaatcccagcactttgggaggccgaggctggtggatcacaaggtcaggagttcgagaccagcctggccaacatggtgaaaccccatctctactaaaaatacaaaaattagctgggcatggtggtggatgcctgtaatcccagctactcaggaggctgaggcaggagaattgcttgaacccgggagtcagaggttgcagtgagccaacatcacaccactgcactccagcctgggtgacagggtgagactcagtctccaaaaaaaaaaaaaaaagagaaaaaaagagagagaggagaagacggaggggaaagccacgtaaatatgaagcagtgattggaagcagccataagccaaggagggccagcagccatcaggagctgaaagaggcaagaaacagactcccctagaatctccggagggagcacagtcttgccaataccctgatttcagatttttgccctccagaactatgggagaatacatttctgttgtcttaagccaccaaatttgtagtaatttgttatggcagtcctgggaaatgaatacagaggacaaggactgcaattatgagagttagctgagtcctgagccctgtgccctgcctctatgtgcaggggtgggattagctttccccaaagctcaagggctgcatgggaaagggatggtcaccaacagaagaggaatgaatatgggagaggcaagcagagtgtccactccaggcaccctgtgtaagaaaagtgccattccctgagcatctgctctgggagagaggagagcatgggaaaaacaggaccctagaggccagacctggacaaggtcaaggcgcaggactacaccatcctggaggtgggggcgggtcttccaaacgctgagaatgcagcagtacatctggaacatggagcaccatcctcttgaaagagtggatgtgaaagtgcatatgagtctgggcgtagtagctcatgcctataatcccagcattttgggaggacgaggcaggcggatcagaaggtcaggagtacaagaccagcctccagcctggccaatatggtgaaaccccgtctctactaaaaatacaaaaattagccgggtgtggtgatgtgcgcctataatcccagctacttgggaggctgaggcagaagaatcacttgacctgggaggcggaggttgcagtgagccaagattgcaccactgcactccagcctgggcgacagagcaagactccgtctcaaaaaaaaaagaaagtacataataattataaaaatcattcacacttaagaggttattccatccacctggttgctccactcaggacctcaagctcatcccagagtcttctctctcccttgccctcccctcacaggcaatctattcccactcctgccagctctaccttctataaatagttccaatctgtccacctccttccatctccatagccattaccctagtttaggtcaccatcctctcttgctagactatagcctctagcttggcctccctgccttcagtctcagccttttcctgccactccctgccagacactagaataatcttccaaaaatgaaaatctgcccatgtcacatacctgttaaaaacctttcaagcccctcagcatgactttcaaagccctgtgattaccagacttcatccctcaccacctcccttgccagttccccctgaacacttcaactcctctcacacctgggagctttgcacacacagctctctctgcctagatgacacccccaccactacttgcccagcaagtcctcaagaattcagctgaggctggcgcagtggctcaagcctgtaatcccagcactttgggaggctgtggcaggcggatcacttgaggtcaggagttcgagaccagtctggccaacatggtgaaaccccatctctactaaaaatacaaaaattagctgggcatggtggcaggagcctgtaatcccagctactcgggaggctgaggcaggagaatcacttgaaccagggaggcagaggttgcagtgagccgagatcatgccactgtactccagtctgggcaacagagaaagactctgtctcaaaaaaaaaaaaaaagaaaaagaattcagctgagagaccgtctcctttgaggggtctcctttatcccccaacccttctaggttcccccacaccccgggcttaccctctccatggttatggatggtgttgtgatgacctgtgtgccattgcctccccactccactccgagctccatgaaagcaggaactacagcctctacctcttcctcctcagtacacagcatatggcaggtgcccagaaatacgttaatgaataaagatcacacctacactaaattcccttgcttttctaaaactaagttcatcctagactctcgctgaatctaaatgtttcccacctcagtacggcaagcatacaaggctgaaaacttggagtcagctgacttgggtcacagcctatctttgtgacctttggtcagttatttcacctccctgagcctcgatttctctttctgaagtgggaattataaaccctacttcataagaaaaacacctggcatgtgacccggtagagggacgcagcacaatgccttccaccttccttcccatatgcacacactttggctgatgtcggcaggcatctgtgaagcgcttaccacgtgccggattcaggcaggtgctgggaggaatgatgatgaccctggccctagatttcacagtaaccgcttctgagaaaactcagctgtaaatccggagtaaatcctgaggattcgcaggtgggtttgccagccagcaggaagccagctaacaggaaggtaacgctgaaccagactcagcctctcctccaaagcccctggatgtgggtcgcaccagagacagcagagtcggtgggtcctacggagacagcggagtcagtgggtctttactgccacctgctggacaaacagaataaggccacaggcagcagcccagagaaattcaggcgcctgcctgaattcagctgccaaatgcacggctctaacttgtatctgccacatttgttcaacagctaatgagagggtatcagaggagattgcttttgaaataaaaaccacctgaccagaaaaaaagaaaataaaaggaaaaccaactgcaccttgcaaaggttacaacgtggagcgtgcctccgggagaaatttctctttctgactcaaaggcgagaaggactagaaaaccctgtgaggtgggaggaagtatcttcttttaaaaccatggtcatactttactccatgggccatcacagagggcagatcctggtgacattctccaaaccttggtgcgcaggaatccaactgaactgtcctgcccataaacaatgcaggatctagctcagtcctggaaaactgcccaaagcagggaggccgttctttccgaaggccttggctttgcagccagacttgctaagtcaacaacgtgggagccagccctgcctcctgccttcctattccaccctccaacttctcttccctccacccgatagttctcctccttggcctgccacactcaggagtgcacacacacacacacagtcctccattccattattctcatttatttgggtggaaaatcttttctgggaaaactaggaggcagaatccagatgggccacagccagggttattttttctctttctccatattccaaccatcctgtgaaaagttgggcccaagaatgcaaactccggaaaaccaagggcagtgcagcgccaagatatttacttagcccatgagtttacttccatctcccaaggagacagtctcagatttcctcaaggcagcagggctttgctgaatccagcaggttgcttctggacacagagagcctggtctctgcagcctctacacagtctgcttgtgagaaggcaaagaaagcctctctggaaaggcccgtcttagcccaggcacacaagtgtggagagtaaaacttggggaagcactgcccatcataacctccggaggtcttatgaccaccaaccctactggaaacacagcaccaagctaagctggggctgggatgaagggctacattgccccagaatttcccaacaggagaaaagccataaaacagacagaaacaagtgggagccatcaaaaacacataaaactggcaggatgcagtggtttatgcctgtaatcccagcactttgggacgccaaggcgggcagatcacctgaggccaggagttcaagaccagcttggccaacatggcaaaacccagtctctactaaaaatacaaaaattggctgggtgcggtggctcacacctgtaatcccagcactttgggaggctgaggcgggcagatcgcctgaggtcaggagttcaagactagcctggctgatatggtgaaaccccatctctactaaaaatacaaaaattaggcgggcgtggtggggggggcgcctgtagtcccagctacttgggaggctgaggcaggagaatcgcttgaacccgggaggcagaggttgcattgagctgagaacccaccactgcactccagcctgtgcaacagagcgagactgtctcaaaaaaaaaaaaaacataaaactacctatacaaactgtgaacagcacaatcctgttggttccactacagtacaaaaattgcaagtttttcatcaaaatagaaaataaaaacaaaaattattagcactctggtattaatcaaccaatgatgatacctcaaatacatcatcttgatctagttgatgatgcccccagaaccccagctgtaacactcatgtccaggcttctgcaacttggcatctcttgcatcttgggggttcacaagaagcaattctgtccttctaactatcctaatttctgaccctgagcttccatccaggccttctgggttctcctcacttacttggagtcatgctagggaggcaagtgggggtgggcatcaggtcatccaccgtccatcttcagaagtcttccctgggccctctgggtccatcagcttcttagaatgcttagggtgtctttttttttttttttttttttttttttaaacagagccttgctctgtcatccaggctggagtgcagtggtgtgatctcggctcactgctcactgcgaactttgcctcctgggttcaaacatttctcctgcctcagcctcccgagtagctgggattacaggcgcccaccaccacacccagctaatttctgtatttgtagtagaaacggggtttcgccatgctggccaggctggtcttgaactcctgacctcaagtgatccacccacctcagcctcccaaagtactggcattacaggcgtgagccaccgcgcccagccaaggcctgggcattgcaagacagtcccaactgcctacaagcactaacatctatcactctctgaagacctagctccccagggacactccaagaagcagcgctcctgttccacctgcccttagcatcccccaatctctctctcttctctaccatatctcacaacctaagacttttttttgttgttgggggtggggggatcctggggaaaattcttttcttccagatttcttcaagatgcacagtctgttggcccaaaacccctttgcctccttaccaaaaaacaaatcagtaaatccattttgtaaaacaaaagccagagagatttcttggctcctttagactctgctgcatgactccactcaggcaatgacagagagccaactgactgcttgcatggagaggagaatgaaggagggaaagcaaatacacgtctcaaacgatcatccagacactggatccacacacatatcctctcccatcactcaagattttggctgtggtcagttgtggtttctttcttgatgaacgatactgtttgaaaaaaagtcagaataaaagttactcttttgttcctcctaacaggcccttagtacctgtatttctcaacagcctctgtcgacctttgtccttctcccgttccttccttttctctcccatcactgtctcttctcagtctgacattctgagaggagctggccagaagtcaccattgcccaagtcaagagaagcaatgatgacaaaggcagcagctcaggtggccacacatatcccctgtttcagcccacaatgtacctgttcccccctccccagtcatgtcatcatgtgagcacttcctaatttccacatcccaaaataccccttttagccttcatcttacttggcctgtctctatcaaagatggccactccctcttccttaaaaatcttattattattagatttggcttgaaaggcaccttcacccacctggtcttccttctcctctgctgccacagcctgcctttgtggccagatccttccacctaccttttcactgccattgctccccaaagttctgtcctcgacccccttctctctccgtgtgccctcactaaacaccctcaacctctcttaatgctctaacacctactgagacatcaacaattcccaaattcacacctccagtatccctctccgattctacacatgtatatgcaactgcctgttgactgtttaacctggaaaacgaaaagctagagagtggataagatggttaatttccaatatttgaaagagtgtcagaccacagagcagaccaggactaaatgggtagatttcagctcagcacgctgaggactttcctttttttttttttttgagacggagtctggctgtgtcacctaggccagagtgcagtggtgagatcttggctcactgcaacctccgcctccctggttcaagcaattctcacgtctcagccttcctagtagctgggattacaggtgtgcaccaccgttccaggataatttttgtatttttagtagagatggggttttgccatgttggccaggctggtctcgaattcctgacctcaggtgatgcacccgcctcggcctcccaaagtgctaggattacaggggtgagccactgcgcctggcctacaccgaagacttttctaacaaacaacactagccaggggctaacgcagggcatccttctgaggtagtgagatccctgcgactagaagtaggcacagaggatttctgcagatggcacaaggccaaactaagcaacatctatgttttccccagttctcagattgagacttctcagctcagtagaggttcagataaataaaagatttttttcattttattgagtatctaaaattacaattcttcaatataggacactggttagaaattactgtgatatttccttttcattgatttttttaataatcatgatttgttgtttatcaaataaatactttggttttggggtgttttattttatttttttgagatgagatctcattctgtcacccaggctggagtgcaatggcacgacctcggctcactacaacctctgcctcctgggctcaagtgatcctcccacctcagcctcccaagtagctgggactacaggtatgcaccaccatgcccagctgattttttttttctctatttttggtagagatggggtttcaccatgttgcctaggctggtctcaaactcctgggctcaggagatccacctgccttggcctcccaaagtgctgggattacaagggtgagttgagccaccacgcccagccatactttgcataacaaactcatttgtcttgtcatacatacactagtttttagagaacaaaattttcttggtcactgactggagggtttcagattaaagcacagttgcaaacacaccgcttctagacatttctcttcattatgttcccatacactgtttttaaaaatagtaaattaggccaggtgtggaggctctcgcctgtaatcccagcactttgggaggccaaggcaggtggttcatgaggtcaggagttcaagaccagcctggccaagatggtgaaaccctgtctctaccaaaaatacaaaataattagctgggcgtggtggcaggcgcctgtaatcccagctactcgggaggctgaggcagagaattgcttgaacctgagaggcggaggttgcagtgagccgagatcgcaccactgcactccagcctgggcaacagaatgagactcagtctcaagaagaaaaaaaaaaaggtaagttaatagataaggaattataattaaatccaaatcatatttaacacaaagactttttaaaggttcttcaaataccttgttattttttcatcaccagcctgggatgttatcaggcaaccctaaatacagttaaggcaaatactgcaccattactaaaggtaaatgaatttgtggcgatattcactgaacattttcatgctgggccccatgcccagcatgtatgaaacagggatgttgagtaagtcatagtcctgccctcaaagagctcttggcctaaagagggaggcagacgcatgagccaatgatcacagtagaataaggtaagtattgtgatatttgtcagcgagaacagggaagcctagacaaaggacacttacgactaaggtcttggccgggcgcggtggctcactcctgtaatatcagcactttgggaggtcgaggtgggcagatcatatgaggtcaggagttcgagaccaacctggccaacatggtgaaaccccgtctctactaaaaatacaaaaataagccgggtgtggtggcacatgcctgtaatcccagctacttgggaggctgaggcaggagaattgcttgaacacgagaggcggaggttgcagtgagctgccaagatcatgccactgcactccagcctgggcaacagagcaagaacctgtctcaaaaaaaaaaaaaaaaaaaaaaagaataaggtcttgtttaaatacctaactgcaggggggtgagggataagagactacacattgggtaaactgtacaccgcttggtgatgggtgcaccaaaatctcagaaatcaccactaaagaacttatctatgtaaccaaacaccacctgttccccaaaaactattgaaaggtttaaaaataatacctaattgcaaaatcttaaaataacaaaaatgtaaaagcaaaatttttacacttccatcatctaatcaaattgtttccacttctccatcttaccttctaatctttatacatatacatgcaattatttcatacatgcaatattatgaaagtagtttgagagtccaccttttcatgccttatatcattagtatttttccatttcacttttttttcttactcccacttcatccccttgagataaccaatactctacatcttctttctcttgatcgaatcacccagtggtagggcaccagaataatattcaaattagaacaattgggccaggcacagtggctcatgcctgtaatcccaatactttgggaggctgaggcaggcggatcacctgaggtcaggagttcgagaccggcctggccaacatagtgaaaccccgtctctactaaaaatacaaaaattagctgggtgtggtgacagacgcctgtaatcccagatatttgggacgctgaggcaggagaatcgcttgaacccagaaggcggaggttgcagtgagccgagacagtaccactgcactccagtcttggcaacaaaagcgaaactctatctctaaataaataaataaatggcccggcgcggtggctcacacatgtgatcccagcactttgggaggctgaagcgggtggatcaccaggtcaggagatcgagaccatcctggctaacatggtgaaaccccatctgtactaaaaatacaaaaaattagctgggcgtggtggtgggcacctgtagtcccagctactcaggaggctgaggcaggagaatggcgtgaacccgggaagcagaacttgcagtgagccgagaccatgccactgcactccagcctgggcgacagagcgagactccgactcataaataaataaatagcaaaactgaggcctagattgacaactcctccatggatcacagcagcaacattgtgtgaattttctttgcttagctacttatgcacgtatgctcttcatactatttttttcttctctccctcccgcccccctatatatataataccccaactcacagcttccacctttactcatagtttcagctgcctcataactcctgctcacacatgggccaacacaacctttcaataacatgacatttccatttcagcaattctgccgtcctcctcaagcccctaatatctcttggctctgtttctcaagtttacctttttatgccagacatactcatggtctcatcatctatgaccttgagaggaggaagaaaggggggtgtggtgatatgatctacaactgcccttttagcaaagacagtggaaggggcatttttttcctccctccgacagccttggccatgactcccctcaccgccaaagccaccacattccctcacaaggttctgccttgttcatacaccttgtggggcctttgaaaaagtttaaatggttaaatgctcaattaactgctatggagtatactaaaatttcacatctgaaagcttttcttgtgtcagcttcaataaggaggcaggaagaaacaatccttgagcccgtcagacccaaaggtgacttactctagtggatcccagacctgccaaggcgaggccccagatggtgttgctattttctcatacatgcagggccaagaatggacctcagagtcacatatgcacctaggtcccagttctgccactctgtgtgatcttgaagaggtcaaaaccttttttttttttttttttttttttgagacggagtctcgccctgttgcccaggctggagtgcagtggcatgatcttggctcgttgcaacctctgcctcccaggttcaagctattctcctgccttagcctccaaagtagctgggattacaggcacacgccaccacgcccggctaacttttgtatttttagtagaaacagggtttcaccatgttagccaggctggtctcgaactcctgacctcaggtgatctgcctgcctcagcctcccaaagtgctgggattacaggtgcgagccaccatgcctggcctggtcaaaacattttgagtcttgcattcctcatctccaaaatgaggtaaagttttttgttttttttgtttctttgtttctttctgagacagtttcactcttgttgcccaggctggagtgcaatggcatgatctcggctcaccgcaacctctgcctcccgggttcaagcgactccttctcctgcctcagcctcccgagtagctgggattacaggtgttcaccatgacacccggctaatttttgtttaatagagacagggtttctccatgttggccagctagtcttgaactcctgacctcaggtgatccgcccacctcagcctcccaaagtgctaggataacaggtgtgagccaccgcgcccggccaaagtgaggtaaatttttaaaagtgacttcatacaagtaattgtaaggattaaaatattaaatggaaaaccgagtttagtgtcaattaaggattatgcaattgctggtttaactaatttcccatttagtttttggcctagggaaaagcctgttaactaagtaaatgttccattttctatcaacaggaaaacaatcagctacaaaatcaccagtgtctcctggattccaatccttggtcaacagtgctagatctacagaagcaaaactaaaattttttttctttcacagagtagttttaagcctccaagcgtttgaatctttaaaatgtcattcagggactttaaatgaagtagtgaaggctgggcacggtggctcacacctgtaatcccagcactttgggaggccaaggcgggtggattacttgaggccaggaatttgagaacagcctggccaacgtggtgaaaccccatctctactaaaaatacaaaaaattagccgggtgtggtggcgagcacctatagtcccagctactcaggaggctgaggcacaaaaatcgcttaaacccaggaggtggaggttccaacgagccaagttcgcgctgctgcactccagcctgcgtgacacagtgagactgtctccataaataaataaatgggaaaaaagcagacgaagcatactggtttctctttttaacctttatttacaaagaacacaactcctcttgacacaaacacacacacatttcaaggaggagcccattaagaacaacaacagactggcgagaatgacggggccttattgaacactgtcaataaggaacactggtctgtgtaccccagactaggggtcactgcaaacattttctcagatatgacttttcacctccaagacaggaaaagagatcttgacgtggaggcccgcccacctacaaggcagaaagctccacactcaatcttcagcatcgtcaaactgtcctgtttcaaagaccatcttggaataatagggtatcagtggaggcggatggtgccagctggggtcatagatcatgtctccttgtggggcacagcacacccaaggtttaagctcttgagaaatgctctcctggatgtcgtcagcatctgcaggcagttttaaaagacagattaagggaaggaaggagggaaggaaggaaggtaaaaacggacagccaaaaaggtatgtctaggggacagatccttgcacttattttgtttaaaaacacacacagttctcctttcctgaagaattgtaaatgcgttcattcggaacagctgagaagctatgcttctcagacaagggttcttagcagtgaagaagcaaactggataacacagcacttctatctgcagctgctcaattcatagcagagatttttggagagagtaacagttttgactttaaaacagtgatacattatggagtcaaatgcaaaatttggattttttcaatataaaagagaaggtgtcacagaaattggagacctgtaacagataccagcctaagctcatagatgtggacccctgttccaaactgccttcagggctggtctgacaggtgtgtctgagaaggcctagttcaggacccccagagactccacacctaccatatggattcccttgatctgctttcaactccgagtcccagtcctcattaaaaagatcgccaggctgttccttgggtggacagtttgtcccttctgacagctcccaggtattcagttctccatcagagtcctcctcatccatggcaaagccttcctcttcagaatgggtgccctcaccccgggcaggactgtcattaggaatgctctgtgttccacgggctaaattgacaaagagaagatggccttagtgacaaaccaaagaggacctgctctgtgctcagtaaattttgggcagacttactacgaaggtagtaaaacaagtgcacagagtcttctttagccaccgagcacttttttaaaaatgcacttctttgtatgtttttaaaagagctgataatttattttcaataagacgttttgtcttatacaaggcattaattgtcaggtcctttaatttacaaagagggctagggacagttaacattttcaggtggtttgtatgtcactgaggcaaagggcctctgataaataatacactttcacaatacaagcctgaattaagtttttgctcttttttttttttttttgagacagagtctcgctctgtcgcccaggctggaatgcaatggcaccatctcggctcactgcaacctctacctcccaggttcaagcaattctctgcctcagcctcctgagcagctgggattacaagcgcccgccaccacgcccagctaatttttttgtatttttagtagagacggggtttcaccatcttggccaggctggtcttgaacccctgaccttgtgatccacccgcctcggcctcccaaagtgctgggattacaggcgtaagccactgtgcccggttgtttttgctcttttattcctcccttcagcctcaaagagcatgttagaggtgagcacagggacaaaggggagcaggggcactgcaggcagaagaccagaacccatctaatcacaatgggcagcacctagtgcctccctctgacatcagggaggccggaaggtacattttcaaaaggcctcacaataacggaggaaagactggggaaagataatggatttccgagcacatagtgctttggtgatgccaggtcccaggagagaaggcaatcagcctaaaacagccatgctcttaatactggaacaacagtaacagtgataagcaataaagtgatagttcagagcaaggggtctaaagccagactgtctgatttcaaatccgtgttttgtcaattaccaaacatcggactgggccgggcacggtagctcacccttgtaaacctagcactttgggaggccaaggtgggtggactgcttgagctcaggagttcaaggccagcctgaacaatgtcgcaaaccctgtctctacaaaaaattcaaaaaatttagctgggtgcagtggcatgcacctgtaatcccagctactcaagaggctgaggtgggaggatcgcttgaacctgggaggtggaggctgcagtgagccaagatcgtgccattgcacagagtgagaccctgtctccaaaaaaaaaaaaaaaaaaaaaaaaaaaagtgtgattgagctgaaatttacttaactagttccataacataaatatagaattaccatatgacccagcaatcccagtcctaaacatatacccaaaagaactgaaaacagctgttcaaataaaacaaggatactcacagcagcactatttacaatcaccaaaaggtagacacaacatcaaatgtccatcaatggatgaatggaaaaacaaaatgtggtatatgcatatgatggaattattcagccataaaaaggaatgcagtgctgatacatgctacggcatggatgcaccttgaaaatacgctaagtggaagaagccagacacaaaaggccacatattgttatgattccctttacaggcaactcacatttgcctatccagaacagataaacccacagagacagaaagcaaattagtggttgccaagagctcagagaaggaaggaatggagaatgactacttggtgagcacagggtttccttttagggtgatgaaaagattctggaactaggtagtggtgatggttgcacaacactgccattgtgctaaaaggctactgaattatatgcgttaaaatggttacatggtaaatttaggttatgcatcttttaccacaatttttaaattgtttttatttaactgttctgtgcctcaacttccacatctgtaaaatgaagatagggttgttgtgagagttaaaagaaaaaaaaaggccaggcacggtggctcatgcctgtaatcccagcactttgggaggccgaggtgggcggatcacctgaggtcaggagtttgagaccagcctggccaacatggtgaaagcccctctccactaaaaatacaaaaattaggccgggagcagtggctcacgcctgtaatcccagcactttgggtggccaaggagggcagatcacgaggtcaggagatcgagaccatcctaacaaggtaaaatcctatctctactaaaaacacaaaaaattagccaggcgtggtggcgggtgcctgtggtcccagctactcgggaggctgaggcaggagaatggtgtgaacccagggggcagagtttgcagtgagccgagatagtgccactgcctgggagacagagcgagactccgtctcaaaaaataaataaataaataaataaataaatacaaaaattagccaggcgatatggtgcacgcctgtaatcccagctactcaggaggctgaggcacgagaatcacttgaacccgggagacagaggttgcagtgagccaagattgcgacactgcactccagcctgggtgacagagtgagactccatctcaaaaaaaaaaaagaaaaagaaaaaaaggggccaagcgtggtagctcacacctgtaatcccagcactctgagaggctgaggcagatggatcaggtgaggtcaggagttcgagaccagcctggctaacatggtgaaaccccatctctactaaaaatacaaaaattagctgggcatggtggcatatgcctgtaatccagctacttgggaggctgaggtaggagaatgcttgaatccaggaggcagaggttgcagtgagccaagattgtgccattgcactccagcctgggcaacaagagcaaaactccctctcaaaaaaaaaaaaaaacggcagggggctgggcacagtggctcatgcctttgtaatcccagcactttgggagcgtgggctcacagtaatcccagcactttgggaggcctaggtgggcagatcacttgagatcaggagttcgagaccagcctggccaacatagtaaaaccccatagctactaaaaatacaaaagttagctgggtgtggtggcgcgtgcctgtagttccagctactcgggaggctgaggcaggagaattgctttaacctgggaagcggaggttgcggtgagctgacatcgtgccactgtactccagcctggtgacacagcgagactccgtttcaaaaaaaaaagatattttgagagagaacacattcacgtaactttcagtatactggcataattgttctatattactattgttattaatcacatatgcataatttataagttaaaccatatcagaaatagtatatataggaggaaaaaaaagcagtttcaggcatccattggggcgggggggtcttagaatgtatcccctaggaataaggtgagactgctgtactattttcaccgtttcaagctgtttctctcggtagaaggatggatttgaacataagaaaagttcaggacttcccttaaggaagctccaagcaaggcttccaaaggaggttactgttcaactgggcagagaaggccactaagcagcagagaggactggctaaaagagaaggtaaatgagacagagggactattcctctcctcacatccttggtctccccaacttccgtctctgccatctacttgcctagtcgatccatagccttctcagtctctctctcctgactggagtggtcagctgtagcaaagccagcctgcaggaagaagaaatgattaccaaggacttgggtatctggggtatgcccagtattcagctattgcatctcaaccccacccactcttccatactccccttggtgatgcagggctgggactctgccacccacatttctactttgccctgttaaactgagcaaggctggagggagatgggccttgttccttcctattcatgtaggcatcacctcatgacacttcaccgtggcagcaggaatgccttcctatagtggccacagaatccagtatacagttctgcgaactcttgcagagccagtcttatcactgcaccttctctttagaggtctgggtctcaggactctcctccaagctcagagaccccctaccatcagctggggcagtgccttctccttaaaggttggaatttcagctctgcagagccttttccctaagcttttaaattttaatcaacttcatctctttgttccttcagccataggttggtagctgttccctgcggttgccacccccaggtacacgttttaccttttcagttacttaacaactttatagctagtaaacaactctatcaaattctctgtttcctcaccaacacactgaggtgggggaagctttataattcctctgcaatgctgagcactgaaggcagtatttctaatctaactgaaaatcttcccgcacagccaaccaaatgcttctctgctcccatcactcagaagttcctgaaaccctatgacctccaagacctctttctaatgaatcacgaaatgttccctgcctgcataaaagacctgattttgatcccagctctgccatccattcagagtgtgaccttgaacacatcacttcaattactgtgcctgagttttcttctccagaaattaggggtgactgttctgaccctgcaggggacttatgattagacaccatttatgaaaacacctggcatgtggcaagaatgtaacatttcttgaatttaaattcatcttttctgctacatctaaactgtactcggcacctgctccaatcagcattcattatctagtcatgtctgggtttaataattcagttccactccctgtagttagtgacaacctctggtcactgccgcccaaggagaagtcagacctctcacctaaaccactgccacggcctcctaaccaccttcccatccagccatctggcccagccttacagaattaatcactactctgctcaaaaccttcaacagccctccactgagagagcacaaaattagccatggcattcgcacgtcccctcttctcccactcccatcaacctgttgagcatagttctctgcatgctctgagacccaactccaggccatgtgccctgcactttctcatctccacgcctctgcagacaccaccagcctctcaccttgatcctttcctgctatgccctgacaaaattagtcccattctattctgcactccaaagtaattttctttgtaagtgtcgctgcatttttcatatcttactttggctaagtaccatctttgaggcatcattcatccagtcggtatgtctatctcctgtgccaggcactatgctaggctgtgcaaacagccctaacagagggttcctaccttcaagccgctcagcacctagccggtacagactgtaaacaaggacaggtaagaactgtaataacggtctgtaacgttctcgggaaaaccaggagctgtctagcttacatgaaaacaagtttctggaaaccctgcgtcaaacagggcctttctggtttcagtaaggagaagggggagcgcgcatgtgacatctggggctcagggttagctggcatccccaccaacggacagaggtccacaggtctgtaaagtcaagtccctctcctcgccgccctcacctggccctcgcccaggctcctggcagcgggccccggctctcggtcaccagcgtcacctcccatttaccaaatccgcagcggcgcccagcgggcggacagccgtctctgctgacccagagcgcccacccacgccctcggctttccccgccccgcagccccgcggccccgcggcctggccgttttcagctcgagcgcgagcccaaacagcgctccgtgtcgcggggcggcccgaggccggccagaggcgcttccccggccccgcggcccccgcccagcccggccccgcgacttcccgccccaggctgcggctggctgttgctcctggcccccacgcggcgctcacctccgggctggggggcgccccccgcgcgctaggcagcggcgggccccgagacggctccgcggccccctgcgcctgggccccggcggcctgaaggtccatgccctgcggcccgcggctggtcgccctggacgccgtgggccacgtgacgcgccggcccggctgcccgcccgaggatccgccgcagaagcgccaatcagcctggggagggggtgggtaccggccaagagggcggggcgcgggggtgtcacgagcaagcgggggcggggcggcgcagggggcggggcgcgcggcctcgcggagcccgcccctccctcccagcgcgaaatctgaaacaatctcggagacggattttggaaactcctctcggtgcatatcctaaggctgcacgactagctgcgtgtgaaacgccaagcgtaccctactcggccactcggggtgtgctccagcttcaaaaccccgcgtgggtaagacacatgagcaacccagtgacctccaccttgagctaatgatcgtctttgaagttaatccattagaaaccaagatagatgattaagacacaaactgcaatatgcagtggacacagaatacaggccacgacgcttactcataataatcctgaacattcgggattcctgtatttccatgctcaacgcctgataccgacaacctaattatttcccattttgcctcgaaaggtggcttctggggataggcagggcctgagctgggaacagcccaactggaaagacagccttccctgccttccccacagtgcctaacctctaataacaaaccagctcaaggtgtgctaatcacgtcaacatcaggacatgagaccctcttccttcatccccctcaaagactgtgttgtttgtacaacacaaaaggcatttgaaaaaatttagcataaaactgacacacaatattcgatattatttttgttctatatgtagatgttcctacacaggagtcagtatccccaaggctaactgcctctaggtcagcaatgtccaatagaacgttctttaatggtggaagtggaaatgaaagttctactatctgtactgtccaatatagtaaccatatacctactgagcacttgaaatgtggccaatgtgaataaattgaataattctaataaatttaaattgctacatgtgccttggagctactgtttctaacagtgcaactctaggtgtactagctagatgtgttttcataacctgcaatattgagaatcagatacagggatgtgatgaccccaggtgaccacccttatagccttgtgttaaggagactaccactatcctctttgctccctaatctacatatctctttcgtaaaattaaagtgccaaataagattaagaatgttaaacatcccaggacttaagggacaggaaaaagaggaatttttttcttattttaaaacaaatgacaagaaaacaggggctggccgcggtggctcactcctgtaattccagcactttgggaggccgaggcaggcagatcacttgaggtcagttcaaggctatcctggccaacatggtgaaaccccatctctactaaaaatacaaaaattagccaggcgtggtggcacacacccataatcccagctactcgggaggctgaggcaggagaatcacttgagcccgggaggtggagggtgcagtgagcagagattgccccacagcactccagcctgggcgacagagtgagacttggtctaaaaaaaaaaaaaaccagaaagaaaaagaaaacagtacaaaagcttaaaataaaaatgttctaaagtagactctaatactcatagaaatttaatatataataaaggtaacatcacaaatcagcagagagaaacataactgcccaaatagtgttggcaaaattaactgcttggggaaaaagagttgttctcagcaccaggaagagcttccaaagcattttaaaaacagacatcacacatacacacacaaaatacctctgggcatcaaaaatcgccacaaaaggtgcctataatcccagctacttgggaggctttggcagggagaactgtttgaacctaggaggcagaggttgcagtaagaccacaccactgcactccagcctggaccacagagcaagactctgtctcaaaaaaaaaaaatcaccacaaacaaggctgggggtaaaattatttgcaacaaatgagaaacaagatattaatattctgaatatgtttttaaaaactctggccaggcacaatggctcatgcctataataccagcactttgggaggttgaggtaggaggattgtttgagcccaactgtttaagagaccagccctggcaacatagcaagaccagtctctacaaaaaaaaatttaaattaaccaggcatggtggtgtgcacctgcagtcccagctactcaagaggctgaggtgggaggatctcttgagcccagaagttaaggctgtagtgagccatgatcacaccactgcactctagcctaggtgacaaagcaagaacttgtccaatttaaaaaaaaaaattaactcataaattagtaagaaaaaaaatttttaaatagtctaaggatgtaaaaagatgagaaacataaaatacactaacttcactaatatcaaagtatggtaaaacaatgacatatcacatttcacctataaaatggtaaaaataaaagatataattacaccagtacaggtaagggtactgacactttcatgtattgcttgaaagaaggagcaaaccagcaatacatatcagtattctctaaaagcagtatcctttgatccagtaattccactgtcggatgtcaatctcctaaggaaatggccagggatgtgaacaaagattgacaagaatcttcatcaacagcatttatctaatttttaaaaaaattagaaatgacagtccaggccaggcttagtggttcacgcctgtaatcccaacactttgggaggccaaggcgggtggatcatgaggtcaggagttcgcaaccagcctggccaatatgatgaaacccccgcactactaaaaatacaaaaattggctgggcgcggtggcgggtgcctgtaatcccacccagctgctcgggaggctgagccagaaccacttgaacccgggaggtggaggttgcagtgagccgagatggagccactgcactccagcctggatgacagagcaaggctccatctcaaaaaaaaaaagacagtctaaccagaggattagtaaaatatattatggctcatttttacaatgtaatgttacgaattcattaaatgtttttaaggctatttaatgacacagaaaaacaatactaagtgaaacgtaacaataagctacactgaaagcttctcccagtgacaggatgcttttttttaccacactattctatttcctccatattttccagaacaaatgcataccacgtatcttttataatgagaataaaccaacaaaactgtactttctcctttttttttttccttgagaaggagtttcgctcttcttacccaggatggagtagcaatggcatgatctcggctcactgcaacctccgtctcccaggttcaagcaattctcctgcctcagcctcccaagcagctgggattacaggcacccaccaccacacctggctaatttttgtatttttagtagagacggggtttcaccatgttggccaggctagtctcaaactcctgacctcaggtgatccgcctgcctcagccttcccaaagtgctgggattacaggcgttgagtcaccatgcctggccactttctccttcattttaactggctcttaggtcgagattagagatactcatgcttgacctgggataattttaaaaaaacccagtcgtatgctatccatgtattttgggaaacatttaggacctgtggaagatcgggcctcaacattaaatcagcaattctctttactggaatcagattagcacatcaaactgagcagtgtcatgcacctataatcccagctactcaggagtctgaggtgagaaggtcacttgagtccaggagttcaagaccagccagggcaacagagcaagacccagtctcaatcataaaaattttttaatttttaaaaagatttaacaagttaacataaaattaaagtgtgtctcaaaaccagacagccatcttgtctgccatcactgagcaaattacagatggactcaatacaaatttgcccacggggcttgcttgcaatactatttcacaaagctgactgtattcttcatcttcataaatggccagtctgatgcatagcatgtttagctacaaatgcctctgctgactctccctgcaacattttcatcgctcgccagtagatctgtccacagttctcaggtctaccaagggggtggttcaattcttctttcatataatccatccaaagatcttttaaaaaaaaaacatacaattagataactgacagagtgttattaggtaaccttattaaatatcaattcaactcaagatttctaagaaacttaacttctcattgttacttccctaggacgctttgtttaacaatacctctcttagcttctttaaagtatagtggcaggttttggtttgtttttgtgtgtttttttcttttttgagacagggtctcactgtgttgccccggctagagtgtagtagcgggaacatggcttactacagtctcaacctcctgagttcaagtgaccctcctgcctcagcctccagggcagctgggaacacaggcacaccaccatattaggctaatttttttattttttgtagaaacagggtttcactatattgcccaggctagtcttgaactcctgggctcaagcaatccttctaccttggccttccaaagtgctgggattacaggcgtgagccactgtgcctcatcagttttgtttttttgttttttgttttttttcccagtagaaaaccttcacatcaatcataaaagtctattttattcaatgaactcaaaaatactaaactttttggctaggcacagtggttcacacctgtaatcccggcactttgggaggccaaggcgggcggatcacctgaggtcaagagttcaagaccagcctagccagcatggcgaaactccatctcgactgaaaatacaaaaattagccgagcatggtggcacgcgtgcctgtactcccagctacttgggaggctgaggcacgagaatcgcttgaatctgggaggcagagattgcagtgaggcaagattgcgccactgcactccagcctgggtgacagagtgagactctgtctcaaaacaaaataaaaataaacaaatcaatgtttatgagttcacaaagtccacagattttacatgacatacctatacccagaagtatgttgtacaagtcctacaaatgagggcaatgtggagatagtcaacaacagacgccaattagcatctcacgtttacccctttcatgtaactctaaatacattttttttaagaaaacaaaaccatgcaaatctttctctaatccagagggggtgtttttggtttttgtttttgagacaggatctcattgtattgcccaggctggagtacaatggtggcatcacagtcattgcagcctcaacatcctggggcccaaacaatcctcgcacctcagcctgctgtgtagctgggaccacaagcatgcaccaccatacccagttacttttttttttttattgtttgtagagatggggatctaaatatgttgcccaggctggtctcaggctcctgagaaatctagggttcttaacagacgacccatggacccctgaacttatgatcctgaaatgatagtatacacaaagcaagtgaggaggcagaggaaggaaacaagttttattttaaaagagggttatgatgcaaatcaaaaaactaagaaacagttttgtttgtttgtttgtttgtttttgagacggagtttcactgttgttgcccaggctggagtgcaatggtataatctcagctcactgcaacctccgtctcccaggctcaagcgattctcctgcctcagcctcccaggcagggattacaggtgcgcaccaccatgtccagctaatttttattttagtagagacggggtttcaccatattggccaggctggtctcgaactcctgacctcaggtgatccgcctgccttggcctcccaaagtgctgggattacaggcatgagccactgtactcagccaagaaacactgttctaaccatactaattggtcacaaattaagggtttacttaccagaatctgcggatccaaactctctcaaagctctctcataatattctcttatgttcgccatattgcaggattcctgacaaagatagacaatcttgtctcaaaagcctgatttataacataacaaattcattccaaccatattgttaagcagctactgtctgtcaggtatttgaagggaagagtttaacatgaacacaacttggctctcaacttttctaggaaaaaaatcaaagccactcaacagagtgaagtacatatgtgaaacataaaagcactttgctgtagtagcatggagaaaagtgctattagaaaaaagtgggggacatgggcagcttcacagaaaacagtatttgaaagtcttgaggaatgagtgggaattaaataaagaaacagcgaaggttctattcgctttgagtaaggatttcttccttttgaatatctgggctctggtacttatttgttatatccaccttaaaataaatactagttatatgaccttcagcaagtttttgaaccctttgaccttaaacatttcctcacctataaaacaagctttaatatctcttagcacaactataagtattagattaaaatgctgatgaattatgtacctagcagaatagctgtaactaactttacaaccaaaaactgctcattctccacctatttttaaaaatgtattcttgccgggcacggtggctcacacggtcaggagatcgagaccatcctggctacaacagtgaaaccccgtctctactgaaaatacaaaaaattagccaggcgtggtggcgggtgcctgtagtcccagctactcaggaggctgaggcaggagaacggcgtgaacctaggaggtggagcttgcagtgagccgagatcgcgccactacactccagcctgggcgacagagcgagactctgtctcaaaaaaaaaaaaaaaaaaaagtattcttgccgggtgcagtggctcatgcctgtaatcccagtactttgggaggccaaggcaggcagatcacaaggtcaggagttgagaccagcctggccaacgtggtgaaaccagtctctacaaaaaatacaaaaattagggccaggcgcggtggctcacacctgtaatcccagcactttgggaggctgaggcaaggcaggtggatcacaaggtcaggagttcaagaccagcctggtcaacatggtgaaaccctgtccctactaaaaatacaaaaattagccaggcatggtggtgcatgcctgtaatcctagctactcaggaggctgaggcaagagaattgcttgaacctgggaagcagaggttgcagtgagccaagagtccagcctgggcgacagagagagactccgtctaaaaaaaaaaaaaaaaaattagccaggtgcggtggcaggggcctgtaatcccagctactcgggaggctgaggcaggagaatcgcttgaacctggaaggcagaggttgcagtaaaccaagatcgcgccactgcactccagcctgggcaacagacagcaagactcttgtctcaaaaaaaaaaaaaaaaaaaaaaaaaagtcaatttaacctcatattttagacatgcatgaaaaacagaatcacacctgtttaatggctcatatgtgcacggcattatgcaacgtcctttctatccagtatcccatttggccttacaactctcatacccctgaaacaggtataatgacctcctttacagatgaggatgggaagcttagaattaagtgacttgctcaaggcacctaactatcatgttataaatccaaagcctggctattacatattaggctagactatctcctatactataaaactgttctatactgtagaataagaacagatacttggcctgccaggcgtgctggctcacacctgtaatcccagcactttgggaggctgaggggggcggatcacctgaagtcaggagtttgagaccaggctggccaacatggcaaaaccccgtctctattgaaaatacagaaattagcagggcgtggcagcccgtgcctgtaatcccagctactcgggagggtgtggcaggagaagcacttgaacccaggatgcagagtttgcagtgagccgagatcacaccactgcactccagcctgggcaacagagtaagactctatctcaaaaaaaaaaaaaaaagtaacatgtaagttttctattccccaaacatatactttctctttgcttgattaccgttcttaaaccagctctatggaaaagggattagaccaagggatcagaaatttatactgtattataatgagagctttttacataacaaaacactcccgggccaggcacggtggctcacgcctgtaatcccaacactttgggagtctgaggtgggcacatcacgaggtcaacagatagagaccatcctggccaacatggtaaaaccccatctctactaaaaatacaaaaattggctgggcatggtggcgtgtgcctatagtcccagctactccggggggctgaggcaggagaatcacttgaacctgggagatggaggttgcagtgagccaagatcacgccactgcactccagcctggcaacagagcgagactctgcctcaaaaaaaacaaaaaaacaaaaaacagtctgatagattagtaaccactaatccattttcccagacaagaaatgctgaaacagaacacttacttgctccttttcaaactgaatcattttcctgaaaaagtcaactgaaaatggtcggctctcctgtaaactaaaaaggaaggagaaaacgttatcttcaacaatgacaaaaagcctcttacatctcataactgtaaataccgagaccagtgcctccacaacacatggtttaataaagacttgacttcaaatcaatgcaaggacttgacctgatggccagtcattctcacgattctatgaccactaatgactttctcttcatacccagttcttagttttttggttttttttttttttttttttttgagacagggtctcactttgtcacccaggctggagtgcagtattgcaatcatagctcactgcagccctgaattcccaggctcaagcaatcctcctgccttagcctgtagagtaactgtgactacaggcatacataaccacacacagcttatttttgaaattttttgtagagaagaggtctcactaggtttctcaggctagtctcaaactcccgggctcaagcaatcctcccgcctcagccttccaaagtgctaggattacaggcatgcaccaccatgcctggtttaattttcttactgtactcttctttatcaattgtagagttttcaagttccctcaactacatgtcaaagtcttttgggaaatcagtaattccatttctaggaatatattctaaggaaatgatttctaatatggacaaatatttgtgcagaaatattcatcaaaacagtattactgtggccaaaaaagttatactgcatccacggccgggcatggtggctcacacctgtaatcccagcactttgggaggccaaggcaggtggatcacctgaggtcagttcaagaccagcctgaccaacgtggtgaaaccctgcctctactaaaaatataaaaattggctgggtgtggtggtgggcacctataatcccatctacttgggaggctcaggcaggagaatcacttgaacctgggaggcggaggctgcagggagccaagatcaagccactgcactccaacctgggtgacagagtgagactccatctcaaaaaacaaaaacataaagttatactgcatccacagagtggtatatcatacagctttctcttttattttttccttttagacaaagtctccctctgtcacccaggctggagtacagtgctgagatcatgactcactgcagcctagaattcctgggctcaagcaatacttccacctcagcctccagaatagctgagaccataggtgcaaactgcatctggctaattgcttttcatttttagtagagaaagggtctcgctatgttgctcaggctggtcttcaactcctgggcccaagcaatcctcccacctcagccttggcttcccagagttctgggattacaggaatggcatgagccaccacgcctggcctctttatttttttttttattttttgagacaggctctccctctgttgcccaggctggagtgtggtggcacaatcatagctcactgcagcctcaaactcctggactcaagcaattctcccacctcagcctcctaaagcactgggattacaggtgtgagccacagtgcctggcccatcagccatgtattgttttaatttcaacttttattttagattcaggggagtacatgtgcaggtttgttatgtgtgtatattgcgtgacactgaggtttgggatagactgaccctgttacctgggtaaggagcacagtaatcgataggtagcttttcagccctttcctccattcctcctaccctccttccccctatcctgtagtgtctactatttctgtctttatatccacgtgtacccaatgtttagctataattgcaagtgagaacatgtggtatttggttttctgttcctgtgataacttgctgaggacaatgacctccagctgtatccacgctactgccaagaacatgattttgttgttctttatggctgcatagtattccatagagtatatttaccacattgttttttttccaatcaactgttgataagcacctaggttgattccatgtccttactattgtgaatagtgctgtgatgaacatacgagtacatgtctttttggtagaattatttgttttcctttgggtatatatctagtaatgggattgctgagataaatggcagatctgttttaagttcttccagaaatctccagctgatttccacagtggctgaactaatttacattcccaccaacagtatataaggtttaccctgcagccttgccaatatctataattttatgactttttaatagccattctgactagtgagatggtatctcattgtggttttgatttgcatttctctaaaagttagtcatcttgaacattttttcacatgtatgctggctgccttcaatacagctattatgtttgttttgttttgggttttttgtttttgttgttgttgttgttttggtttttttttttggtttttttttttgagacggagtcttgatctgtcgcccaggctggagtgcagtggcgcaatctcagctcactgcaagctccgcctcccgggttcatgccattctcctgcctcagcctcccaggtagctgggactacaggcgcccgccaccacatctgactaattttttttgtatttttagtagagacagggtttcaccatattagccaggatggtctcgatctcctgacctcgtgatccgtctgcctcgacctcccaaagtgctgggattacaggcatgagccaccgcacctggatgtttttgttttgagacagggtctcactctgtcaccaaggctggagtgtactagcacaaacacggctcactacagcctcaaccacctggactcaagtgatcctctgacttcagcttcccaagtagctaaaatcacaggcacatgccatgacacccaactttttaagttttttttttttttttttttgagatggagtcttgctctgtcgcccaggctggaatgcagtggcgcgatctcagctcactgaaagctccgcctcccaggttcacgccatgctcctgccttagcctcccaagtagctgggaatacaggcgcctgccaccacgcccggctaattttttgtattttttttagtagagacggggtttcatcgtgttagccaggatggtctcgaactcctgaccttgtgatccgcccgcctcggcctcctaaagtgctaggattacaggcatgagccaccgcacccggccttttaacttttcatagaaatgaagtctcgttgtgttgcccacgctcgtctcaaatgcttgggatcaagcaatcctcttgtctcagtctcccaaaatcctgagattagaggccttgaaccaccgtgcccagctcatatagctatgtttaataaatgatgtttataaagaatttttggctgggcacagtgcctcatacctacaatcccagccctttgggaggccaaggcaggaagatcactggaagccataaggtcaagatcagtttaagcaacaaggcgagaccctgactctgcaaaaaaatttaagaattagcggggcatcgccaggcatggtagctcatgcctgtaatcccagcattttgggaggctgagctgggcagattgcttgggcccaggagttcaagaccagcctgggcaacacagtgaaaccccatctctactaaaaataaaaaattacctgggtgtggtggcacacacctgtagtcccagctacttgggaagctaacgcacaagaatcacttgaaccaggaaggcagagtttgcagtgagccaagatggcgccattacactcagcctgggcaacagagcaagactctgtctcaaagaaaaaaaaaatatttaggccgggcacagtggctcacacctgtaatcccaacacttagggaggccgaggcgggcaggtcaccagaggtcaggagttcgagaccagcctagccaacatggcaaaaacccttatctactaaaaatataaaaaattagccgggcgtcgtggcacatgcctgtaatcccagctactcaggaggctgaggcaggagaatcgcttgaacccgggaggcagaagttgcagtgagccgagactgtaccactgcactccagcctgggcaacacagtgagactccatctcaaaaaaaaaaagaaattttttttaaatcataaataaaattacagttatactataatctcaactacataaaaacaaattttaaaattatgtgttaacagtaatttttccttcgatgatgtaataaattatcatggttatgttttcccccaccacaatgaactgcttttattgttcaaaaaaaagaaaaagaaggccaggcatggtggcttacacttataatcctagcactttgggaggctgaggcaggaggactgcttgagcccaggagtttgagaccaggctgaacaatgttgtgagactcagtctctaccaaaaaaaaaaaatgttttaagttagctggacatggtggtacatgcctgtagacccagacatttgggaggctgaggtgggcggactgcttgagcccagaaggtcaaggcttcggtgaaccatgattgtgccactacactctaacctaggtgacagagcgagaacctgtctcaaaaaagaaaaggaaacattactttttgaaaaagttcactggaggccaaatgcactggctcatgcctgtaatcccagcactttgagaggccaagacaagcaaatcacttgagatcagcagttcgagaccagcctggccaacatgatgaaaccgtctctactaaattacaaaattagccgggcgtggtgtcacacatctgtaatcccagctattcaggaggctaaggcgggagaatcactgtctcaaaaaaacaaaaaaaaaacaaaaaaaaaggaaaatgaaacagtgtattgggtcaggtgtggtgcctcatgcctgtaatccctgcactttgggaggctgaggtgggcagatcacctgaggttaggagtttgagaccagcctggccaacatggtgaaaccttgtctttaaaatctaaaatttaaaaattagccaggcgtggtggcaggtgcctgtaatcctagctactcgggaagccgaggcaggagaatcacttgaacgcaggaggcggagattgcagtgagcagagattgtgccactgcactccagcctgggcaacagagcaagactccatcttaaaaaaaaagaaaaagtgtatcagattactccctcagatgctatctgtgattcaaataatctgggtatgagcggctgagcatggggtagagggactagtaacaactatgaacgtctgtgagtaccttttaaacacagctctggcctttttgtagccaccacttcgataagcccaatccaggtacttattcttcagggttactgagtcggcacctatgacagctaagagagctttctacaatttaaaagaaaaaagaaagaagctatgtgagaaaacttatagataccaaaacagattttcccagaaccacctgaggccactccatagtgctttaggcgcacctgcaacactagagctgaccaaccagggaaccttctgccattccccacaccacaagacttggaacacggagcctataccttaaagactgcctcagtgtcttcttggcttttggcaccttcactccactctgcccaggaaatccacaatggcagacaaacctactcccagtttaaaaaatgttagttagagaacagcatataacaaaacatcgcatgtaccctataaatatgtaaaatattatgtatcaatttttttatgctataaaatgacagtttagtcctatgctctgaaaactagttaaaaaggcaggttcctcctaagataatcaacatgtaaaatagggattcattcccaaacagtcctcattgtgacagaattctcattgcccagcaggaatggcactccagaacacagccagccttctgaccaagtcactcagagcaacactcttctgtgaattttagttcctttctattgggaaatatttcatgtagttatcatcaatcatcttttagttaagtaagtaattaacagcccacacagttagacccacagctacccaggtcatgtctctgctgtctaagacccacaacacaagaactaattaatctaggctgaactatctgatcttcattcatgtcccagaggtacgtacaaatgagcagcaaaagcgaggcatggtggcgcacatttgcaatcccagcactttaaagacggaggcaggcggatcacttgaggccaggagttcaagaccagcctggccaacatggcaaaaccctgtctctactaaaaatacaaaaattagctgggcatggtggtgggcacttcttatcccagctacttgggaggctgagacaggagaatcgcttgaacctgggaggtggaggttgcagtgagccaagtttgcaccactgcactccagcctgggcaacagaacaagacttcatctcaaaaaaaaggaaaaaccaccaaatgagcagtagtttttttcctactttatcttctggaatacgttttacctactaatataaaaaattcactgcaaagtgaatctggccatacaccgtggctcacgcctgtaatctcagcactttgggaggccaaggcgggcagatcacttgaggctaggagttccagaccagcctggccaacatggagatatcctgtctctactaaaatagaaaatattagtcaggtgtgatggcatgcgcctgtagtcccagctactcgggaggctgaggcaggagaattgcctgaacccgggaggcagagattgcagtgagctgagatcacgccactgcactccagcctggacaacagagcgagactccatcttaaaaaaaaaaaaaaaaaaggttgggcttatattcagcaagtgacattaatattctactggtatttctaactttataagatatctaaatagaataggaagttttatttaatttggttaactttcaaataaaggatattaaatagaagcaaattcttctactcttaacctatgaaccatcaccactgaatagcaaatgccactctagagttggctctcaatagacaagtacattccaaatgagccttggctagtcttaaaaggtttcccaaatataatgaatacaaaagatccagctcactgacctggggtttcaggtgcacaaaggcttcttcaaaaagcatggctatgtcagggctctttgactcgatcagcacctgcagcttcagctgccacattgtcccagagtctctaaacaattcagttccagctactgccacttccagagcttccctcaggaagttataacacagcaacgaaacactctagacaagatgaaggatgactggaaaattaattactgaaacccaaacaatctatgtaaatgtaaacctatgcctcatttgaggcaagaatttcaccaacctttccactacaatttaaaataaaaaagaggccaggtgtggtggctcacacctgtaaccccagcactttgggaggcccaggcgggcacatcacgagctcaggagatcaagaccatcccggccaacatggtgaaaccccgtctctactaaaaacacaaaaattagctgggtgtggtggtatgcatctgtaatcccagctactcggaaggctgaggcagaagaatcgcttgaatccaggaggtggagattgcagtgagctgagatcacaccactgcactccaacctcggcgacagagcaactctatctcaaaaaaaaaaaaaaaaaagaaaagaaatgagctatgtgataacttataggtatcaaaacaaattttccatggctgttaaacaggcacgaagtgaacaatttagaatttctcctattttcactgctcctacccatgagggttatccaaaaacagggaagacgtaaaaaccagagaacctaaagaatttagactgtaagttaggtttttttgtttttctttttcttttttttggagacagagttttgctctgtaacccagcctggagtacagtggcgcaatgatctcggctcactgcaacctccaactcctgggttcaagcaattctcctccctcagcctcccgagtagctgggacgacaggcgcccatcgccacgcctggttaattttttgtattttagtagaaatggggtttcaccatgttggccaggctggtcttaaactcctgacctcagatgatccacccacctcggcctcccaaagtgctgggattacaggcgtgagccaccatgcccagcatataagtttttaataaaacagttcacagccaggcatggtggctcacgcctgtaatcccagcactttgggaggctgaggcaggcagatcacctaaggtcgggagttcaagaccagcctgaccaacatggagaaaccctgtcactactaaaaatacaaaattagccaggcgtggtggtgcatgcttgtaattccggctactcgggaggctgagtcaggagaattgcttgaacccaggaggcggaggttgaggtgagccaagatcatgccattgcactccagcctgggcaacaagagcgaaactccgtctcaaaaaaataataaataaataaaaacaaaacagttcactatgccagaacacatgctcaccaaacagaggatgaaaattaacaaataggctgcgctcagtggctcacgcctgtaatcccagcactttgggaggccaaggcaggcagatcacctgaggtcaagagctcaagaccagcttagccaacatggtgaaaccttgtttctactaaaaatacaaaaattagctaggtgtgttggtgcacgcctgtaatcccagctactcgggaggatgagttgggagaatcacttaaacctgggaggaggaagttgcagtgggccaagatcatgccactacactccaggctgggtgacagagcaagactctgtctccaaaaaaattttaaaaatcaataaacaaaaatcaatccacaaaatcagtatttgtggagtgtcaaggaaacaggtatattcaaacagagttggacataacataaactaaagcaaatttttctgaaattcaatttgacagtttgtagcaagagtcatgaaagtgctcaacgcttcaatttgggacttctacattaacaaatatggtccaaaaaatacatgaatgaaaggaaattttacctgttcaaaatgcttatacctacattatttgaaaaagagaaaaaacctaaaaacaatccaattgtacaaatttgtgaaaaattaaatgacagtatataatcagtacattcagcaagcatttttattgcacactatatgtgctagattcaatagtgaacaaatcagatgcattccctaccacccatagagcctccagtctaagagacaaaacggtttgatatgtttcttccgacagaagatgaatcatctaggctgggcacagtggctcacgcctgaaagaccaagttagaaagccaggcacggccaggagcagtggatcatgcctgtaatctcagcactttgggaggctgaggcagtcagatcgcttgaggtcaggagctcaagaccagcctggccaacatagtgaaactctgtccctactaaaaatacaaaaatttggccaggcatgatggctcatgccttagtcccagcactttgggaggccgaggcagggggatcacttgaggtcagaagttagagaccagcccagccaagatggtgaaatcccgtctctaccaaaaatacaaaaattagctgggcgtggtggcatgcacctgtgatcccagctacttgggaggctaaggcacaagaatcacttgaacccaagaggcagaggatgcagtgagctgagatcgcgccactgtgctccagcctgggcaacagagtgaaactccgtctcaaaaaaaaaaaaaaaaaaggaatgggtggacaaacaaaataaacccaaatcatgactcttgttctaagtgcttttcactgtataatactcctccctttgctagtacagatttcattttttgcataggccaaatactgggaaacacatataaacacacttcacataccgaactcccaagtggccttcatcttaagactatatatatttaaaacatgactctggcacaaaacaactggaataaggtatttgtaactggcacagaatattttctctatgttcttaccaactgcttgtattggcattctgacagaagcttcagttcatgtgccttcctgaatacagtcatggttctttccaacctctgaaaacagaaaaatccctcagttcattacaaagatcccagcaggggcctctggcctctgacatgaacaaaagcagttttgcgcatttcttaaaattcaaagaagctgacttgctcctgcatggtggtttcacttatgaatagatgcaatgggcagctgcaccgaacagagcccagttacacgagagcccctcctaacctggcggcaaaccagactcagacctttagaatgtcacgtcacccacaaggagagagagagtggctaaacataaaagttctcagaaactgtgccagacaccaaaagatctgtgcttctgttctttcagaaggcagtcactatctagtcaaccactgtaaccatgtaacaacctcaccttccctctaaggaacccactatttgacttcttagtaaatctttccaagcaaaaggtgatgtaacacttccacatggcctctggaaaagtcagaaagattgtgttgatcagatcacttagttcaacattcatcacatcaaagttattaaaagataaggaaaaaaacagtcatcctacacctttacttcaaggggaaaactctcctctgaagaagagtttaaatcagcctgattttaagaagtgttatgctgactacagccaatcaaacacctcaaatattgggggaaaacaactgagtaacagcttaaatataaaaattgaaagccttatccaggttatatatcccctctgcctttattctacattattacaaaataaaaattaaatcactttccaaagataattaagggcgaggcagtggttcacatctgtaatcccatcactttgggaggctgaggcaggctgatcacctgaagtcaggagttcaagaccagcctggccaacgtggtgaaacctcatctctactaaaaatacaaaaatccatggggcatggtggcatgcacctgtaatcccagctactcgggaggctgaggcaggagaattgcttaaacctgggaggaagaggttgtagtaacccgagatcgtgtcactgtactccagcctgggcaacagcgtgagactctgtctcaaaaagataattaaggatgtcggtaatcctagcaagttgggaggccgaggcatgcagatcacttgattctagcagttcaagaccagcctgggcaacatggcaaaactccatctctacaaaaaatacattaaaattggcctggcgtggaggcatgcgcctgtagacccagctactcagggggttgaggcgggaggattgcttcaacccaggaggcagaggttggagtgagctgaaattgcgccactgcactccagcctgggtgacacagcaggatcctgtctcaaaaaaaaacatagataattaagaaataataattgaagaatcttagaaattatttcctaagcttcccccaaaatagatgaacataaataccactactatggaggaaggtcataaaagttagaaagccaagaccaagttagaaagccaggcacggccaaatgcggtggctcatgcgtgtaatcccagcactttaggaggccaaagtgagcaaaccacctgaggtcaggagttcaagaccagcctggccaacatggtgaaactccgtctgtactaaaaatacaaaaattagccaggcatcgtggcacacgcctgtaatcccagctactcgggaggatgaggcaggacaatcgcttgaacctgggaggtggaggctgcagtgagccgagatcacaccattgcactccagcctgggcaacagagtgagactctgtctcaaaaaaaaacaaaaaacaaaaaaaacccaggcacggtggctcacgcctgtaatcctgtaaccctagcactttgggagaccaaggcaagtagatcgcctgagctcaggagttcgagaccagtctgggcaacacagtgaaaccccgtctctactaaaatacaaaaaaattagctgggcatggtggcgggcacccgtagtcccagctatttgggaggctgaggcaggagaattgcttgaacccgggaggtggaggttgcagtgagccgaaatcgagccactgaactccagccagggtgacagaacaagactctgcctcccaataaaaaaaaaaaaaaaaggccaggctcatcgtaaactatgttacagagacatccccaatattgattttggcaatgggaacaggagcttaagtttcacaatcagggatactattccttctatatcacaccatggtttggtgaagttcacctgttggcagagtcttcactgcctcttcatacacagcacagcacctctcctccttccggccgacctccactgctttggcttgtttcgttgtaggctgctcttctgtctgtgactcaatctctaattctcgccttgccacataatcccaagtgagaggatcatctgtgtgtagagcctgaaggctgaaaaatacaatttactgttatcaatcccacaacaagaaactgactcagaatatcagagaaacagttacctgtgcttaaaaaatctacacaggacatccctgtaacaactgcagtaccataaaaactatttcccaggccgggcccggtggctcacgccactgggagaccagcactttgggagtctgaggtgggtggatcacctgaggtcgggagttcgagaccagcctgaccaatatggtgaaaccccatctctactaaaaatacaaaaataagccaggcatgatggcatgtgactgtagtcccagctactagagaggctgagacaggagaattgcttgaacccaggaggcagaagttgcagtgagtcgagatcgcatcactccagcatgggcgacagagcgagactctgtctcaaaaaaaaaaaaaatatatttcccaacaggctctccagaatatgttcactaactgtagaaattttgtcaatggatcagaattgtcccactttttcactttttttttttttttttttgagccagaatctcattgccaccaaggctggagtgcagtggcacaatctcagttcgctgcaacccccatctcctggattcaagcaattctcctgcctcagccttccaagtagctggaattacagacgcataccaccacgcccagctaatttttgtatttctttgggagagatgagttttcaccatgttggccagactggtctcaaactcttgacctcaagtgatcctcctgccttgggctcccaaagtgctgggtgggattacagtgtgagccactgcacctggccagagctgtcccacatttattgagtttcagaatatttcaggtatcattcacaaatgttaactttcaagttagctctcaaagtcaaatcagcagttatctgtgacaacacaagactccaagagacctgaagaacttttttttgtttttgagatagggtctgtcacccaggctggagtgcagtggtgccatcatggctcactgcagcctccacctcccaggctcaggtgatcctcccacctcagcctcccatgtagctggtactacaagtgcatgccaccatacccagctaattttggtagttttattgtacagagttttgccatgttgcccaggatggtctccaactcctgggtgctcaagcaatagtccatcccaaagtgttgggattacagcccctgtgcccagcctaaagaactttattatagctgagctcttcattttcgtttgtgtgtgtgtgtgtgtttgtgtgtgtgttttaagacagagtttctctcttgttgcccaagctgaagtgcagtggcacgatctcaactcactataacctccgcctcctgggttcaagcgattctcctgcctcagcctccggagtacctgggattacaggcatgtgacaccacacccagctaatttttgtatttttagtagaggcggggtttcaccatgttggccagactggtctcaaactcctgacctcaggtgatccgcccgcctcggccttcccaagtgctgggattacaggcatgagccactgcatctgttttttttttttggagacagagtcttctctgtcaccaggatggagtgcagtgggacgatctcagctcactgcaacctccaccttccaggttcaagcgattctcctgcctcagcctcctgagtagctgggattacaggtgcatgccatcacaccaagctgatttttctatttttagtagagacggggtttcaccatgttggccaggatgatctcaatctcttgacctcaagtgatccgcccacctcggcctcccgaagtgctgagattacaggcgtaagccaccacacccagcccagggttcttcattttctaaataatagagaaaaagcacaacctactcctctctcaaaaccctgaagatatccaaacaacagattgattcaagttccatttcccctcctgtcaaaggaagaggtgttaccaaaaaacggaagtacccacaaggtaggctaaaaatattttttttttctttttttgagacagggtctcactctgtcacccaggctggggtgcagtgatgcaataacagctcacggcagcctcaacctcacaggctcaagggatcctcccacctcagccccgcaagtagctgggactacaggcacatgtcaccatacccaactaattttattgttattttttgtaaaaacaggtctcgccatgttgccgaagcttacaaataattgttaaaccatataatcagacattaaagaataaaattaccagccaggtgtaatggctcacacctgtaatccttgcactttgggaggctaaggcaggaggatcacttgagctcaggaattcaagatcaacctgggcaacatagtgagacctcatctctataattaaaaacataaataaataaaaatataataaagaaataaaaagaataaaattaccagcactcaactataaacatatgagtataactctcattttatggataaatgccaggaaaatagaatttagaattttatataagctttagattttttttttttttttgagatggaattttgctcttgtttcccaggctggagtgcaatggcacaatcttggctcactgcaacctccacctcccggcttcaagtgattctcctgcctcagcctcccgagtagctgggattacaggtatgcgccaccacgcccgactaattttgtatttttagtagaaacgtggtttctccatgttggtcaggctggtctcaaactctcgacctcaggtgatccatgcatctcggcctcccaaagtgccgggattacaggcttaagccaccgtgcctggctagattttttttttttattgaataaactatttcccccagtaagtgaatcaaagaactcaatcaggaagatactttttttctgagacacggtctcactctgtgacccagacaggagtggagtggcaggatcacagttcactccagcctcaacctcccagactcaggtgatcttcccacctcagcctccagagtaggtaggaccacaggcatgcaccaccacacctagcttattttttgtagagacagggtttcaccgtgttgcctagggtggtctcaaacccctgagctcaagggatccacctgccttggcctcccaaagtactgggatcccaaagtgtgagctactacactgggccaggaaatttttttttaacgtaatatgatattaatttttttttttttttgagatggagttttgcttgtcacccaggctggagtgcaattgtgggatcttggctcactgcaacctccgcctcccaggttcaagcgagtctcctggctcagcctcccaagtagctgggattacaggcatgcactaccacgcccaactaattttgtatttttagtagagacggggtttcaccatgttggtcaagctggtctcaaactcctgacctctggtgatccacccacctcagtctcccaaagtgctgggattacaggtgtgagccactgcacccggccaatattagcttttattccagggatttagtgtggtatcttctttctcttctactaaatatccaacctcaaacccttaatctcaagatcagaaatagatatattcacctttctactaactttacttactcatcataaatctctttttgtagatctttggcaaagtcaaatagctgtgcaatcgaaagcagtgacacgtgaaattctgcacctaaatttaaaaagcaggggaggggaagtttattgccaataagaatcactttactttaaaagtagcattcttttcatgtactggagttaatcttcttgttttttgaaatgagaaatagaataaaatagaagaaaagtcatcccatagtcccctcaccccagtgtccccctactcaagcaaagctattgttaatctttggagtattcataaaaaaagaactaattttcaactccccacgatttaattactccatgagaacttactgaggattggtgcaatggctcacaccagttatgccatcactttgggaggccaaggcaggaggatcacttgagctcaggagttcaagactagcccggacaacatggtgaaacctcatctctactacaagtacaaaaactagccaggcatagaggtccatgcccagctactcaggaggctgaaatgggagaatcacctgagcccatgaagtcgaggctacagtgagccataattgtaccactgcactcctgcgtgggtgacagagtaagaccctgtctcaaaaaaaaaacatggaaggataaatgagtacacgctgggtacagtatacactgctcgttgatgggtgcaccaaaatctcagacatcaccactaaacctgttccccaaaaacctattgacatttttatttttttgagatgaagtctcgctctgttgcccaggcgctctcagctcactgcaacctccacctcccgggttcaagcaattctcctgcctcggcctcccaagtagctgggattacaggcgcccaccaccacacccagctaatttttgtatttttagtagaaatggggtttcaccatgtgggccaggctggtcgcaaactcctgacctcaggtgatccacctgccttggcctcccaaagtgctgggattacaggcatgagccaccatacccggcccaaacctattaaaatttaagggaaaaaaatgggagtagaatataaattttaaaaagagacttatgccaggcatggtggctcacgcctgtaatcccaacactttgggaggccaaggcgggcaggtcacaaggtcaggagtacgagaccagcctagccaacatagtgaaactacgtctctactaaaaatacaaaaattagctgggcagggtggcacacacctatagtcccagctacttgggaggctgaggcaggagaatcacttgaacccaggaagcagaggttgtggtgagccgagatcacgccaatgcactccagcctgggcaacagatcaagactccatctcaaaaaataaataagttactgaaatgttcaattatagcctaggaaaaataagtattttctgaaagaaacaggacactattcctacagagttttatacacattctaatggaaaatttcaaaactagctaaagatcttcattaagaaaagaatgtttcactttcctaccaaaaataatgttcaaaagatacctacctttaattatgcttacagaatttttgtagatgatccatgccaactcgcccttaaggatttcttcagaataatcaggattctcctaaagagtgttatatcaaacgtaacttaacaggtagtacaaggaggaaaagcactaggacgaaaattaacaatcctagactacctgtgccatatgaccactggtaaatcatgtctctctctccgggccagttccctcacttgtaaagtgtgcagcttgaacaagatcactgaccttccaactgtgttctctgaggctccaagagtggtggcaagatcacatggcttaaggcctcactctccatttggaccaaaacaggtcagattttacatgtcttgtttgcgcttctctgtaacattttatttgaataaaaaagtcctggcctggcgtggtgactcatgcctataatcctagcactttgggaagccgaggcaggcggatcacttgagatcaggagttcatgaccagcctggccaacatggcaaaaccccatctctactagaaatacaaaaattagccgggagtggtggcgggcacctgtaatcccagctacttcggaggctgtggcaggagaatcacttgaacccgggaggcggaggttgcagtgagccaagatcgtgccagtgcactccagcctgggcgacaaggagcaacactccgtctgagaaaaaagttctaagctggaaaccacaataacagacaatagcaaagtttcttctcagctctaacattctaaatcttttaattattctgtcatataaaaaattatataaaaagggaaagaaagaaggccaggaaaccacacatttcacaacctttctcaagctccttgaatccattaatatatcactttatgagatcatacagcgttaaagaatagtatttggctattctgtaagtaacaattttgagaaccacattaattagtccaaatatctatttttatagcataaagcttcattttcctaactaagtccatttataagtaacactaactcatctggaagtttcaaaatgtaacaacattaaacattaaagcttgaacccggaggcagaggttgcagtgagccaagatggtgccactgcactccagcctgtgtgacagaccgagactccgtctcaaaaaaaaagaaaaaaaaagaaaaatatattccaaatattttctcttactcctaagcaggctcaaaatgttatacatcgttagcaagtgagaataaaataattagaaccttaccacatccatactggctttttcaaattcttccttctccttcctcagtttttcagcatgcatcagctccatcctaaagtactacagaagagaaataaactgaaaatctttggagatgctttttaaaatttttttgagacagggtcttgctctgtcacccaagctggagtgcactggtgatgacagctcatttcggccatgaattcctgcactcaagtgatccccttgcctcagcttcctgagtagctaggattagaggtgcattccatcacactcagataatttttttatttttattttttgtagagacaggatcttgctacgttgctgcctggcctgaaacaactgacctcaagtgatcctcctgcctcagcctcccaaagtgctgggattaaaggcatgagccaccacacccaggcttaactttcatttaagaattaaatagcaggctgggcacggtggctcatgcctgtaatcccagcactttgggaggccaggcgggcggatcacttgaggtcaggagttcgagaccagcctgcccaacatggtaaaaccccatctctactaaaaatacaaaagttagcggggcatggtggtgcacacctataatcccagctacttcgggggctgaggcaggagaatcgtttgaaccccgggcgtggaggttgcagtgagccaagaacacaccattgcactcctgcctgagcaacaagagtgagactccatctcaaaaaaaaaaaaaaaaaaaaaaagaattaaatagcagtttctcttttatcctgacaaatgactcagaaaacagtgcagcttccaatacattctttctcttatttgggattttatctaaagcttggccctcaaatgttctaaggcaccatccataagggagtaagtccccgaagagagaaaggaagtactaccaggtatctatctcaagaaaaggagacagaaagaacatggagaaaagaggaagacaaggcaaagaagccagaagagggcttctttggagaaccaagggaacaagaaaaaaaaataaaaacaaaagtataaagaggctaaatctggctcccagctaaaaaaatgttagagtctagttccctattccttccaaccacaggaaggaggcgggggttccaacctctcaactaacttagaagctgcagtgtcaacacctacaaaaagatgtttttccctggccgggcatggtggttcacacctgtaatcccaccactttcagaggctgaggcaggcagatcacctgagttcgggagtttgagaccagcctgcccaacagggcgaaactccatctctactaaaaatacaaaaattagccggacgtgggatcccacctactcaggaggctgaggcaggagaattgcttgaacccaggaggtaaaggttgcaatgagccaagaccgggccactacactccagcctgggaaacagaacgagactccatctcaaaaaataaaaaagatgtttgtccttacccacacctccacacttattcctagcctccataaattgaagccttttttatttaataaagaatacatgggccgggcgcagtggctcacgcctgtaatcccagcactttgggaggtggaggcgggcggatgaccaggtcaggaaatcgagatcatcctggctaacatggtaaaaccccatccctaataaaaaatacaaaaatttagccaggcatggtggcaggcacctgtagtcccagctactcggaaggctgaggcaggagaatggtgtgaacccaggaggcagagcttgcagtgagccgagaccgtgccactgcactccagcctgggcaacagagcaagactgtctcaaaaaaaaaaagtgaaaccagcctggccaacatggcaaaaccccgcctctactaaaaatacaaaaaaaatagccaggtatggtggcgggcacctgtaatcccagctactcgggaggctgaggcgtaagaattgcttgaatccaggaaaaaaaaatatgtctccagaggaccaaactgaaacatcactgtctcatcctatgtgcatacacactcacttctttataaagttttgggcactctggatgaaagcgcagtgcgcgaagaaatagttgccttgcgctttctgaagacaatcgatcttccatttcccatttggctgccataatccacaaagctgtaagtgaaaaaccatcagatttcatttcaataaattaatcaagtcagacaagaaaagaaccaaatgatccaattttaatactcgcacaatttttttttttttttttttttgagacagtctcactctgtcgcccaggctggagtgcagtgacgcaatctcggctcactacaagctccgcctcccaggttcatgccattctcctgcttcagtctcccgagtagctggtactacaggcacccgccaccatgcccggctaattttttttgtatttttagtagagacggggtttcaccatgttagccaggatggtctcaatctcctgacctcgtgatccgcccgcctcggcctcccaaagtgctaggattacaggcatgagccactgcgcccggcccactcaaacaattttttaaaaaaacctttaacaaaaggggaagcagttcggacagacagtttctaactgcaaagcttggctacgttatctaaaattagaaacagtattctgaagcaaatgagtaaatgataacaaatgttcaatttagaggatgagtacctaagtgtctgttactgttttcatcagatctaaggacattattgtaagtcacatacaatttttttctttttttgagacagggtcttgctctgttgctcaggctgcagtggcacaaacaacagctcactgcagtcttcacctaccagaatcccaccttagcccctcaagtagctgggaccacatgcatacaccatcacgcccacctaaattttgtaactttgtagagatgggttttcaccatgttgctcaggctggtctcaaactcctgatctcaaatgatctgcctgcctcggcttcccaaagtgctgggattataggcataagccaccgtgcctggcccacatacaaattttaaaggtagtaaaatgccagaaaaaggccaggcacagtggctcacacctgtagttccagcactttgggaggccgaggcaggcagatcacttgatgtcaggagtttgagaccagcctggccaacatggtgaatcctcgtttctactaaaaaatacaaaaaattagccaggcgtggtggcaccctcctatagtctcagctattacggagactgaggcagaaggatcactttaacctgggaggcagaggttgcagtgagctgagatcacacgactacaccccagcctgggcgacagagcaagactccatgtcaaaaaaaaaagtccagaaaaaactgcttatcttaccacaaataaaattattttttgctcttttctcaatatttagagaaattatagggcaagccacagtggcttactcctgtaatcccagcactttgggaggctgaggtgcacagatcgtttgaggctgggagttctgagaccagtctggccaacatggcgaaaccccatctctactaaaaatacaaaaattagccaggcgtggtggtgcacatctgtaatcccagctacttagaaggctgaggcatgagaatcacttgaacccaggagacagaggttgcagtgagctgatatcacaccactgcactccagcctgggcaacagaggcaagactctgtctcaaaaaaataaaaaataaaataaattataattcataattttctctaaaaccctttgtccttctacatgggaaattaaccctgagttaacattctagctatttccctagacatttaataaaggtcacctatcttatcaagattgcttttgttaaaaatgacgcctgattggtaaccacacctggaatagaagggtcagcaatggtggcaagcaattgctttgggcttccttgaacatgtgactcctaaaattgagcatgacctttctaggatctgtagaagccatgcccatccatggggcttctaaaccagactggatcccctacctactgatatgatctcatctcctcatacctgaacagtcaccttaggaaccagaggctacctccattctgctaagagcattctgcagaaggaacatacctaaggctatcctgctatatttctgagtaaactggtgccaaatgtagtctatttgagtcttgtgtggtataagatatctgattaagcctaataccctgagaataggtgctgaggcccctccactatcaactagaccatttatacattattcacaagagaaatatttctcttacaaaacatgagtctactctgtaccagcactcttctaaaatttatattgatattttcccctttaagcttctaaaattcctcagatttgactgcctccaaataaaatgtcccacaaaggattcaaaagtttattttgccatcatctaaaaagaaatacagtctggccgggagtggtggctcacgcctgtaatcccagcactttggaaggccaaggcgggtggatcacgaggtcaggggttcgagagaccagcctgaccaacgtggtaaaacccagtctctactaaaaatacaaaaattagctgggcgtggtggcgggcacctgtaatcccacctactcaggaggctaaggcaggagaattgcttcaacctgggaggcggaggttgcagtgagccaagatcacaccactgccctccagcctgggcgacagagcgagactccgtctcaaaaaaaaaagaaatacagtccttcttgcctgcagatacaacacctaggacagtaactagtatatagtaggcaggggtgaactatgaggcagctattcagtaagaaaaactgctgaggccaactgcctaagctcaagtcctcaaaataatttctcttagattcatcaatcgaaataaaatccaaaatggcttgagtctaaataaaacatagaaaaattgacaaagatttcaccatacctggtttgttggaatgaatcgccaacatggcagagaataccttgctaagtcgagttttagtagcctgtaaaaaaggaaaatatttctacttcctgcacagataaatcattgatcttactctctaagtaatatgtaccctaactttaccaactgtaaaatccaatggagcatgacatgctattgctagggatatataaacgaacacagaccctcaaaattttctacctcaattaaaccactaaacactttaaatatctttttaaaaagtcaactgtattgaacaaacacacgtaaaaattatattcttttcaattgaattggaaaccatagtcattcagatatccaatgttatattgatgttccgccttcttgggttcttttttcatgttaaccctacacttcaggaaaaaacatctggcatgaagcttaaagggcagattaacaaaaagacggtcagaggaagcaagacatgcatggctttactcacccacttcttacaaaaagccacataggagagccaaagttgaacatcgtcctgcaagaaaagcaatgtagtaagctgcccaaatttgacctttacatataatacacctttgcattaattaattttgctaaaaacaagcaaatttcaggttggatgcggtggctcacacctgtaatcccaccactttgtgaagccgaagcgggcggatcacttgaggtcaggagattgaaaccagcctggccaacatggtgaaaccccacctaacctaaaattacaaagattattgggaggccaaggcggattgatcacttgaggtcaggagttcaaaaccagcctgtcaaatatggtgaaaccccgtctctactaaaaatacaaaaaaattagccggacttggtggcagacccctgtaatcccagctactcaggaagttgagacaggagaatcgcttgaagccgggaggccgagatcgggccactgcactccagcctgggcaacatagggaagctccaactcaaaaaaacaaacaaaaaaaattagccaggtgtggtggtatgtgcctgtaatcccagctactagggaggctgaggcagaagaatcacttgaacctaggaggcgaaggttgcagtgagctgccgagattgtgtgccactgcactctaacctgggtgacagagcaagactccacctcaaaaaaaaaaaaaaaaaaaagccaggcacaatggctcaggcctgtaatcccagcacttttggaggctgaggcaggtggatcacctgaggtcaggagtttgagaccagcctggccaagatggtgaaaccctgtctactaaaaatacaaaaattagccaggcgcggtggtgcgtgcctgaagtcccaggtactggggaggctgaggcaggaaaattgcttcaatctgggaggcagaggttgcagtgagccaagatcacaccactgcactctagcctgggcaacagagcaaaactccatcccccaccaaaaaaaaaaaaaaaaaaaaagaagcagatttcagaaaatccagtcacctctcatcctatctggctcttcctcacaaaggcctccgatctcttaactatgataattcaacctttcccccaactcccactcacaatgctccaaaaaaactttgttatctatccagttggtttaatgcagttcttaaagaatctcaatctggggtagcaatataaaatttgtcattaccaagaatccaaaatacttctcatataatatacccaatcccaaacactcccgtaatcccagcactttgggaggctgaggtgggcagatcacttgagcccaggagttcgagaccagcctaaaaaacatgacgaaaccctatgtctaccaaaaatacaaaaattagccaggcacggtggcatgcgcctgtgatcccagctactggggaggctgaggtgggagaatcatttgagcctgggaggcagaggttacagtgaaccgagatcaccctactgtactctagtctgggcaacacagtgagaccttatctcaaaaaaaaaaaaaaaagaaaaaaaaaaaaatcaagtttctgaggtattgcccctacataaccatttattttctagctctaagtcttcagtgtacttacaaatatatacaaatatctcccaaatttccaatccttagtaatgtatcaaatacactgttttcagcactgtcctcatagaataactataaggtaataagatcaattttcttactggtttgttaagtggctcaaaaaatgttttgagtaatgataccatcattagagtaagtataaagatacccaagataaaaatagaaaactgcatttgaatccctaatacaatatgtataatacttatcttcacatctcataaagttaaggatgccttgatcactcactttccattttgctgaggcacgctggaaaacaccttgtacccggtgtacaatagaattctcaatctcatccttcttaaatgaatatccaatgcgctaaagggggacataaaaaaacagagcctcaacttaatcatatttgtccaaaacagcattcctacttgaccacttaatggtactgatgaagcaaacaaataattacaaatatccattataggcatatcaccacagttttatcaacactgtctcccaaacacaagtcctaactatacagccatactgcttagttctgtatttttctccaacttctagaaaatcttctacttactgttcttcttctctggatcagctccaaaagattaatttcatactatgaaagaaaaacatacaaaaaaatgagaagctagaaaatctaaaaccttttaaatactggaaatttagttaaagtcataaaacaaaaatcgagaatataaaataaaaaataatgtgctatcacataatttacaataaatgtctagaactcacttaaaattcacttagctataaaacttaaacagaattaacaagcttataattacatgcttcacttaaaaattattccatgaaatatttcaagcatataaaacaccccatgcagctacaatgcagctacaccaaacctacattgcactacatttgcttcaaatcttttttagaaataaaacagttcgtataaaaatgaagctacctatgtacctatctctgattctactcttctccctctccagaggcagcaattaccttgactttgttatcattcccaaacatgactttggactttattataatgatgtcttgaatgcctttaaattttacataaatggtatcatgctacatccatcaatccataggtgttttgttttgtttttttgagacggggtctccctctgtcgcccaggctagagtgcagtggcataatctcggctcactgcaacctctgcctcctggctttaagagattctcctgcctcagcctcccgagtagcttggattacaggcgcctgccaccatgcccggctaatttttgtatttttagtagagatggggtttcaccatgttggctaggctggtcttgaactcccgacctcgagtgatccacccaccttggcctcccaaagtgctgggattataggcatgagccaccgtgcccggcccatcaatccatatttctactcaacattatccctttagctatatccctattcaccgaggctggtggtgtgtgcctgtaatcccagctacttgggaggctgatcaggaggtagaggttacagtcagccgagatcatgtcactgcactccagcctgggtgacggagcgagactccatctcaaaaaagaaaaaaaaaaaaaagtttgctcttataatgaatataaagcagtcctacacctggtttttttttattgtttgtttttttgagatggagtctcgctctgtcgcccaggctgaagtgcagtggcgcaacctaggctcactgcaacctccgcctcccggattcaagcagttttcctgcctcagcctccccagtagctgggattacaggtacgtgctaccgtgcctggctaatttttgtatttttagtagagatggggttccaccatgttgaccaggctgatctccaactcccaacctcaagtaatccacccgcctcagcctcccaaagtgctaggattacaggcatgagctaccgcgctcggcccctacaccttgttttaatctttatttaactaattactgataaggctgatgtcttttcataagtttaactacaagtgatgtttcccctttgtgactttcacgttcacatgatttgcccatttttctttttagttttcattttcttctcgatttacagttctttatatatgtgtatatgtagttctaattatgtgttgtaaatattttctcacattttgtggcttgtattttcacattatttgtagtgtcttttttgcacagaaaaaaattttttttttttttgagacagggtctctatcacccagactgaagtgcaatggcgccatcatggctcactacagcttccacctcccaggttcaactgatcctcccacctcaacctccagagtagctgggactacaggtgtgcaccaccatgcccagctaatttttgtattttttgtagagatggggtttgccatgttgcctaggctggtcttgaactcctgggctcaagcgatctgcctgtctcacacgtgagccgccacgcccctccagaaatttgtattttgaacacaatcaaataaatcagtcttttctctcatggtttgtgctttcacagtctaatttagctttaagaaatcttttggctgggcacactggctcaagtctgtaattcccaaaactctggtacggcaaggcaggaggatcacttgagcccaggagttcaagaccagcctgggcaacataaggagaccctatctctacaaaaaataagaaaattagccagccatctggcacaagcctgtagtcctacctacttgggaggctgaggcaggaggatcatctgagcctagaagttcgaggctgcaatgagtgctcgcaccattgcactccagcctgggcaagagtgagtgtattatttggaaaaaaaaaaatctatttttgacataatatggtcttggctcattttgagtgagcaatctactcataggacctcttccaaaaacaatagcttagccaaggttcatatattgtttgttcggctgtcttttgtctttttaaatctaagctcaaaacttctagtctttttttttttttttttttttgagatggagtttcgctcttgtctcccaggctgggagtgcaatggcacaatcttggctcactgcaacctccacctcctgggttcaagcaattctcctgcctcagcccctgagtagctaggattacaggcacccaacaccacacccggctaatttttgtatttttagtagagatgggggtttcaccatgttggccaggctggtctcgaactcctgaccacaggtgatctgcctgcctcagcctcccaaagtgctggtattacagcatgagccaccatgcccaaccaaaacttctagtcttataaacatgtgatcttgttattggttctttctgaatcctgattccgtcatccaacatattagctattctcccccactggaaaattggtctgacataatttttctttattcaaaccttccatgcatttacaagatgaaaaaatcttgcagtacacctctttccaagtggacagacaatagataaacaagcagtaacttttcaattctctacactcatcacattcactctcctctatcttgctcaccaagaggcaaatctcttgctgaagtcctgatacacactatgtctctgacaatctctgatctacaaacccagtagaaaaaaaaaagaaagaaaacgacaagagagaaagaggaggggaaaagtaagttcagtttggccaggactacagtcttagtggagtaatgctactcccaatgctactcctgttcagaaatatctatctaatgaacgtttctggaattcttttaatttttttaaaaaactgatgttggccgggcgtggtggctcatgcctgtaattccagcactttgggaggccgaggcgggtggatcaccaggtcaggagttcaagaccagcctggtcaagatggtgaaacgctgtctctacaaaaattagcctggcgtggttgtgggcacctgtaatcccagctactcaggaggctgaggcagataactgcttgaacccaggaagcggaggttgcagtgagccgagatcgcaccactgcactccagcctgggcaataagagtgaaactccatctcaaaaaaaaaaaaaatttgatgttaagctcatcattctagaactgattttaaatttgtgaaggaatgggaggctgaggcaggagaatcacttgaacccaggaggcggaggttgcggtgagcgtgagcagagactgtgcaactgcactccagcctgggtgacacagagagactctatttcaattaatcaaccaatcaatcaatttgtgaagggattaaaaagtaaggctaggaccgagcatgatgcctcatgcctgtaatcatagcactcgctttgggaggccgatgctggtggattgcttgaggccaggagttcgagaccagcctagccaacatggcaaaacccagtctctactaaaagtagctgggtgcggtgccatacgcctgtaatcccagttactgaggaggatgagacttgagaatcactagaacccggaaggcagtggttgcagtgagccaagatcgcgccactgcactccagcctgggtgacagagcaagactcttgtctcaaaaacaaaaataaaaaaagtaaggctgggcccggtggctcacaaacacttgtaatcccagcattttgggcgtgggcaacatgccgaaaccctgtctctacaaaaaacacaaaagctagccagccatactggcacacacctgtagtcccagctactccagaggctgaggtgggaggatggcttcagctcaggaggtggaagctacactgagccatgatggcaccactgcacttcagcctgggtgaaaggcgagcccctgcctcaaaaaaaagtaatgaaattattaattattggccgggcactgtggttcacacctgtaagcccagcactttgagaggccaaggtgggtggatcccttgagatcagcctgggcaatgtggcaaaacccagtctctaccaaaaaattagccaggcatggtggcatgcatctatggtcccagctacccaggaggctgaggtaggagaatcgcttgagcctggagggcagaggttgcagtgagcagagatcacaccattcacaccactgcactccaacctgggtgacagagtgagatgccatctcaccaaaaaacaaaaaagaaaaaaagaaagaaattattaattacacacttacttgaacataattgataaagtcttccttgaaaagggttcttctctggattttgtactctagatcggaagccttcttaatgatagccctgaggagaaagccatttaaacttcacttgaaaactgcaaaaattaaacgtttaagtttattttgaatatatttaaaacatgtttttcaaaatacgaaattcctagagttatctttcataagaaagtattatcggccggacacagtggctcatgcctggaatcccagcactttgggaggctgaggcgggtagatcaagaggtcaagagactgagaccaccctggtcaacatggtaaaactgcatctctactaaaaatacaaaaattagctgggcgtggtggtgcgtgcctgtagtcccagctactcgggagactgaggcaggaaaattgcttgaacctggaaggcggaggttgcagtaagccgagatcgcgccactgccctctggcctggcgacagagcaagactccatctcaaaaaaaaaaagtattctcttacacaattacttttgtgttcttaagggttcatttttaaactttcaggaaaatcatcttaatcaactcccaaaaccaatgacattcccaccagcaaagcaaatacaattaagaactttataccatttatgtatggtgttttttttgtttgtttttttctcgctctgtcgcccaggctggagtgcagtggcatgatcttggctcactacaacctcggcctcccgagttcaagcgattctcctgcctcagactcccgagtagctgggactacaggcgctcaccaccacgctcagctaatttttgtatttttagtagagacggggtttcaccatattggccaggctggtctcgaactcctgacctcgtgatccacccacctcggcctcccaaagtgctgggattacaggcgtgagccacagcgcctggctggtattaataaagacttcttttactccaagttcaggtcacttaaattttaataataaatttctttccgaaattcctcttatttctgagttctcaacatgtaaatttttttaaaaatctaaattgcgtctgccttaaaagacttattactacgaaggacttacgggagaagattcagagtccttagctaaggaatgaacatatgacaaatatatattaggagaatttaatgcaagatgtgcaagacaggtgtctttagtaatggtaacattaaccttaactgagcactttctaagcgtccacactgctttgttttgtgtttcattaacgaatgcttactttgaagctctgagtcacattactacattcagacgttgcaaaacaaagcaacagtcacagaaaccattaaaaactattaaacataattttaacacgctactgaatgtctaccatgtgccaggcgctgtagttaggctctggagtagcatatgaaactgatttcaatggtccccaccttcaagtctagttaggaatttatccactccccctgggctctcacagcactctgttcccatccctacagcagtacaaggtactacaatcaacttacagtacactgttatcaaaatatttaatttgtctgtctcccccaccacactctgcccaattagctcctaatgagcaggaatcctgggtttatcacctttacagccctaagacccggctccatgaagggctgtcaaaacgtctgatgggtaagtagacggacggattaccttgcaacgaatgaaaaattaattctggacatcaccgaaaacgagaaatgggcttccaccacgttaggaaaagtaaacacaggtcgagcgtccccacatctagcccctgccacacactcccaacctcccctcaggccgcctcagctcttccctctccccaaccctctctcacttaatctccgcatgactgaacagtccaatgcgctccagctgttccaattccgggagccgatcttctatgcgttcctgaattatctctgccatgaggtccgaggtctacaaccccgcgggtagcttctcaacagcgaacacgagcaggaagctcccggtttcaggttcggagacccagccctaccaccgacgcgtccggacgtaacgtgctccctaggtcccgccttttccgcttccgccacctcctacttaggggaaggcccttcggcttctacagccaccgtcccctccctgtggccgattgtgggattgcagcgagaacccgccctggtcttgggcaggacgactctagcggacaggagttgaggggcggggctagacgggagggaggggttaagtgcgcgcgccgctagacttggacagccatcaggaaaagcgcctccaggtgtagagaggtgggctgctcaagcctgaaagggacacgagatgcattttcttcagaatattgtctcccatcccacgtcctgacttcccaacaccaagaacaacaacaaaaaaaaaagcaaaggaggaggatattgtacaattaaacatttttgaaagccggtcgcggtggctcatgcctgtaatcccagcagtttaggaggccgaggcgggcagatcacctgaagtcaggagttcgagaccatcctggctaacatgatgaaaccccgtttctactaaaaatgcaaaaaaattaactgggcgtgctggcacgcgcctgtaatcccagctactcgggaggctgaggcaggagaatcgcttgaacctgggaggccgagatcgcgccattgcactccagcttgggcaacaagagtgaaactccgtctctaaataaataaataaataaaatagaattgtttattatttaaatcaatatcctgtctttgtaagcaatagctttcaaaatatatgtccctaggtgaatatcagacactataaattctttttagaaaaggagatttttgtattgaaaagtttgagaattaccaaaataaatcactaaggtatagacaccctccttaaaccattgcccaagcaacttagcatttctaagagaaacaccaggcaacacagcttggaggcaatattgctggtatagttagtaaacctcaaatgataactacatggttcagttcttttttagttctggatataaaaaagccaaagcagcagttcttgctaaatctgcttatttcaacattcacattagcacctggatcctgtgtgtgatttatgaaaggagaatgggctcagcaaaaccatgttccacctctgtgccttgcatttctttctttcctttcacattttacccactcatctcagaactgagacgagggttggcttgtgctacaccatttcttgaatccttcagctgtaagacatgtcagaagtggaaggaaatcacgaatgtaagacaaagatagaatttatttgtaaaagtaaaatctctggggctgtgttaacagtaagagtggagatgacactagatagtaaactccatatgggcagggaattttttcctttttgactggctagatactctacagcttatagcagtgcctaccatataataagtactcagttaataaatgcatgacactaagaaaaggtacttgctaaatttctttaggtacaaggaagtcagcaagttatgacagactgtaatcatttcaaagtaaatttgatagagaccttcataaattaaccatgatttttattttattttattttatttatttatttagagacagagtctcgctctgtcaccaggctggagtgcagtggcgcgatctcggctcaccacaacctcgactcccctggttcaaaggattctcctgcctcagccgcccgagtagctgggactacaggcacgtgccaccacacccaattaatttttgtgtttttcgtacatacaggttttcatcatgttggccaggatggtctcaatctcctgacctcatgatccacccgcctcagcatcccaaagtgctgggactccaggcgtgagccaacgcgcccgcccaatttttaaatcaaactaactataaatacgctcctcctttatattgttttgttttgttttgttgttctttttaagaccgagcctcgctggccaggcactgtggctcacacctgtcatcacagcactttgggaggccgaggccacggataacctgaggtcaggaattcaagaccagcgtggccaacatggagaaaccccgtctccactaaaaatacaaaaaaattagctgggcctggtggcctctctctgttgcctaatggggagtgcagtggtgcgctctcggctcactgcaacctccacctcctgggttcaagcgatcccccgagtagctgggatgacaggcgtgagccaccatgcccggcctaattacgtttttgttttgttttgagacagggtcttactatattacccaggctggagtgcagtggtgtgaccacagctcactgcagcctcaacctcctgagctccagcaatgctcccacccccgcctcccaagtagctgggactacatgtgtgccccaccgcacctggctaattttccttttttcttttttgtagagacaggggtctcactatgttgccgaggatggtgtttttgtttttgtaaatagagacagggtctcactgtattgtcaccatggtcttgaactcctggcctcaagtgatcatcttgtttccccttctcaaaattctgggattacaggcataagccagcacgcccagcgatcctcccttattttgaaatttagcttttttttttttgagatggagttttgctcttgttgcccaggctggagtgtagtggcgtgatcttggctcactgcaacctcagcctcccagattctagtgattctcctgcctcagcctcccgagtagctgggattacaggcgcccaccaccacgaccagctaattattgtctttttagtagagacggagtttcactatgttggctaagctggtctcgaactcctaacctcaggtgatccgcccacctcggcctcccaaagtgctgggattacaggcatgagccaccacgcctggccaaaatttagcgtttatgtatatattcttgttgttgttgttgttgttgttgttgagacggagtgtcagtttgttgcccaggctggagggcagtggcatgatctcggctcactgcaacccccgccttcccgtttaaacgattctcctgcctcagccacctgagtagctgggactacaggcgcacgccaccacgcccagctaatttttgtatttttggtagagacggggtttcaccatgttggccaggctggtctggaactcctgaccttgtgatcgatccacccgcctccacctcccaaagtgctgggatgtgagccaccccgccctgcctagcttttatatttaccttcaagaattattatgatgggccaggcgcagtggctcacatctgtaatcccagcactttgggaggccgaggtgggtggatcacaaggtcaggagttcgagaccagcctggccaacatggtgaaacctccgtctctaccaaaaatacaaaaattagccgggcatggtggtgcgtgcctgtagtcccagctactcgggaggctgaggcaggagaatcgcttgaacccgggagatggaggttgcagtgagccaagatcacgccactgcactccagcctgggtgacagaccgacactctgtcccaaaaaagaaagaattattatgatgttttggaggccaaggcaggtggatcacctgaggtcaggagttcacaaccagcatggccaacatggtgaaatacccccccactaaaaatacaaaaattagctagacatggtggcgggaatcccagctactctggaggctgaggcaggaaaattgctagaacctgggtggcggaagttgtagtgagccatgatcacaccactacactccagcctgggagacagagcgagactccgtctcaaaaaaaaaaaaaaatacttgggaggctaaagcacaagaatcgcttgaacccgggaggcagagactgcagtgagtcgagatcgtgccactacactccagcctgggcaacagaatgagaatctgtctcaaaaaaaaaaagaattattatgacagaaatgacaaagccttcttttcacttctgcatctcataataatagctgtcattggcccggcgcagtggctcacgcctgtaatcccagcactttgggaggccaaggttggcagatcacaatgtcagaagttcaagaccagcatggccagcatggtgaaaccccatgactctgtctcaaaaaaaaaaaaaaaagctgtcattatgtagggcttattgtgtgcccagctactatgtgcactgttctaagtcctttatgtttttttgtttttttttttgtgagccgaagtttcgctcttgttgcccaggctggagcacaatggtatgatctcagctcactgcaacctcggcctcccaggttcaagtgattctcctgcctcagcctcctgagtagctgagactacaggcgcccgccaccacgcctggctaatttttgtatatttagtacagacggggtttcaccatgttgaccaggctggtcttgaacttctgacctcaggtgatccacctgcctcggcctcccaaagtactgggattacaggcataagccaccatgcctggccaaagtcctttatgtattaactcacctaatagcatcacataaatattttgaaatatcaactcatagaaggagccctcaaaaagagagatagtacctgagattgcaccactgcactcccacccaggcaacaaggcgagactcccctcaaaaaaaaaaaaaaaaaaaaaactacctactggagaaagcccaagacagaagaagaaactgtttgcataaagcccgcaatgtctcaaaatcctggccaggtgcgctgactcaagcctgtaatcccagccctttgggagcccgaggccagtggatcacctgaggtcaagagtttgagaccaacctgaccaacatggtgacaccccatctctactaaaaatataaaaattaaccgtgtatggtggcgtgcgcctgtaatcccagctactcagggggctgaggcaggagaattgcttgaacctgggaggtggatgttgcagtgctgggattacaggcatgagccaccatgccactacgctccagcctgggcgaccaagtgagactccatctccaaaaaaaaaatctacactttatggaagttacactttaattaacaaaaaattacttaccagactctctctttcaacatattgaagctcttcaagagcttcaattgttatttttatgtgtgtggcagggtcagaaatattgaaactcaaatggtcaatgtctttttccctttccaaaagagtttatgataattttgctttctagcccatgatatattagtatttgctttaatataaattattttttttccagattgtaagattgatcacagaaagatgtaccctgatcaccccatggtgaccaaacacttggtccccactgtggtgctcacgagccagtctggaaaatgagaggggtctcagggtgccaacagaatcttttaagaagattgccagatgaacactagccagatgtttgcaaattaagttaaaatttctgttcttgccttcaaagtacttaaaagtaaacttcaaagtaaacttgaacttttccttggaatattcacattgtcacatttgaagttctcagacagctccgtggttaaaaacagcagagaaagagatgctcatcttttttttcattattattatttgataaagggaagtacctagtttgagccataataagaggcaaggcacctggaatcccatccccctgccttgttccaagtcccctgcctgattctcccatacagagagcgcttgtagacttcaaagtcagagaagtgatagacgcagactggtctttgatgcctaagaacatcagagccctcagtttgatgcgaatgcaaagcatctgtacttttcaaacctttcatgttatctcacattgccaacaacaaaagctgaaaagtttgaggtgacacactttacacacattaaaatatttggaaccagtaacttttcatttctttttctattatttatagcttcttttactttgcaaaccgcactggatagtaaattacttctggcacgcagccttgtcagcttgccaaatttcaactggagcaagtttctacagccaggctaatatgcccagaaaaacaggaggtaagtataatggaaataatgacatgatttttaactgcaaagagcgttgaatgataacgcaagatcttaatagattctatttttaagctttttttattctaatgaaatctttaccttttttaaggctattttagtttaaaacacatgtaaatagaaagggttccttttaattggtgaaaaacagttttgtgcttttttccctgtggcttaagttactgctttttgcaaacttgaaaaaaaaatacaaaaaggaaaactaagaatatggtagtttgggtataacaacctactattaaaacaaactgacatcttgaaaaaacatattctgaaatgattgggcttccagaatggtgcctggggattgttgtgtgcgtgaatatgtctcatgaaagccatagctgattagctacatcagcttacctccagtttgccctagtccagatagaaatccagctccagcttaaataacttttaggttttatttgaacaagacttcctaaaattaaaaatggctatcacatctgatttctatcactgaaaaaacttgttaggaggcagtatttgtttccctaaatttaatgcttacatttgttcccattcacaatttacaagtgacaaggaaaattctttctccccttctcattctgccttccaattagacctaaactgattagcctcagcaccacatgctcagtcccaaagtgttgaagcaaagaagaggtttggagttgggtgtgtgtgggtgtgtgtgtgtgtgggtgtgtgtgtaactatactaaaataatgtggccttgctccagaaatgccagctttcttacagttccccaatcatatcattttatacctctattaacacacactattccctttgcctggaatgtcttttgcccccttatccacttagtaagcacagttcatttaaaaaaataaataaataaaaaggaagcatgcccttaccacctcatcatcccaccctcaccaccaatttgtatatttaagtacagaaacataaaggcttcagtctttgaatctctttttcccttaatatcaattttataagtgatcttttacagactcatgacttcaaatgtcacctacatcagtgctgttcaatagaattttgtgtaataatggaagtgtcccacatctgcactatccaatacagtaaatacagtagccattagctacatgtggctattgagtacttgaaatatggctagagcaactgagaactgaattttttttttttttttgagacagaatctcactctgtcgcccaggctggagtgcagtggcatgatctcggctcactgcaacctctgcctcctgagttcaagtgattctcctgcctcagcctcctgagtagctgggattacagacacccaccaccacacccagctaatttttgtatttttagtggagacagggtttccatgaccatgttggccgagctggtctcaaactcttgacctcaaagtgatccgtccacctcggcttcccaaagtgctgggattgcaggtgtgagccactgcgcccagccgagaactgaagttttaatttcatttaatgaatttaaatttaaatttaaattgtcacatgtagctagtggctgccatgttggacaacactgacctatataacttccaaatatattagtagtgccaatccataactgtcccctgaactccagactcatgccagtatatccagctgcctactcaacatctgcacttggagagcttacaggcattccaaaattagtatgtctaaaaacaagtacctgatgctctcccacaaacctgttctttccgtagtcttccccatctcagtgaaaggcaactccgttcttccagtttctcagcccaaaagccttggagttgtccctgactctatatttaattaatcagcgatcctctctgctctacaaaatatagccaaaatatgaccactcctcatcacagctactgctgtcaccctagttcaagtcaccattatctttcacctggattattccagtagtcttcaactggtctccctgctttcactctggcccctttaagtctattcttaacacagcagccaaaatgattgtgttaaaatatgtcagaggacagcattctcttgcttaaaaccctgctgtggttgactcactcaaagcaaaaactaaaaccctttcatggctgggtgcggtggattactcctgtaatcccagcactttgggaggccaaggcaggcagatcacctgaggtcaggagttcgagaccagcctgatcaacatggagaaaccccgtctctactaatacaaaattagccaggcaaggtggcaaatgcctataaccccaactactcgggaggctgaggcaggagaatcgcttgaacccgggaggcagagtttgtggtgagtcaagattgcgccattgcctgggcaacaagagtgaaatgttgtcaaaaaaaaaaaaaaaatctttttgtttgcagaaaagttcccatatgatctggtcccggtaccacactcctgccatatcttaccttatttcccactctgatcccttgctccctccactccagatccactagcctctttggtatcccttcaacatggcaatgcagggcctttgccctggctattccctgcctggaattctcttccccagataaatgtatggctcattccctcaccaccttcagatttttctcaaatgtcactctctcagggaggcctctcctattaccaattgcagcccctcacctcaatacttcttattctacattcttactttttgtttctccatatcactgatcgccatctaacatactataatagtgtttattatttgtctctcctcatatgtacattaaagcataagctccatgaaattgaaatttttttttttttttttgagacagagtctggctctgtcgcccaggctggagtatagtggcacaatcttggctcactgcaagctccgcctcccgggttcacgccattctcctgcctcagactcctgagtagctgggactacaggcgccccctaccatgcccagctacttttagtagagacagggtttcaccgtgttagctaggatggtctcgatctcctgacctcatgatccacctgccttggcctcccaagatactgggattacaggcgtgagccaccgtgcctggcttttttttttttttttttgcagagggatttttgctgttgtcacccaggctggagtgcaatggcgcgatctcggctcactgcaacctccgcctcctgggttcaagcaattctcctgcctcagcctcccgagtagctgggattacaggcacctgccaccatgcctagctaatttttgtatttttagtagagatggttttcaccatgttggccaggctggtctcaaactcctgagctcaggtaatcaacccgcctcggcctcccaaagtgctgggattacaggctgagcctccaagcctggctggaactgaaatttttgaatgtatatttgtataattgtacagtactacttagcttgtattataacatttcttttttttttcttttcttcttttttttttcttttcttctttttttttttcctgagacggtgtcttgttctgttgcccaggctggagtatagtggtttgataacagctcatctcctcccaggttcaagcaattctccaacctcagctgcctgagtagctgggttacaggcatgcaccaccgtgcctgtctaatttttgtatttttatagagatggggtttcaccctgttggccaggctggtctcgaactcctgacctgaggtgatccacccgcctcagcctcccaaagtgctgggattacaggcatgagccactgccgattacaacatttgtggtttttttgtttgtttgtgtttttgttttttgttttttcagatggaatcttgctctgtagcccaggctggagtgcagtggcacgatcttggctcactgcaacctctgtctcctgggttcaagcaattctcctgtctcaacctcccgagaagctaggattacaggtgcctgccaccacatccagctaatttttgcatttttagtacagacggggtttcaccatgttgcccaggctggttacaacatttcttgaatccatatgtctgtatttagtgacactgtgacttccatggatactttatttatctttgaattccccaaaacctagcattggaaaacattaggtatgtactcaataaacactatctgaaaggaaactactggacatttagcatgccacctattgtaagaatcccagtgtctaatatgcccaaaatgcttcctgaaggaaactgatgaacctacagctactttaatctgaccacttgatcctgggcaatttgccactatggctaagatcacaagtaagctcttggctcaagggcaaccaatccactggttggccaaaatcctataatgtaccctggtatgaaaagatgaactgaactaatctaactctccctctctggactccgaattaccattagttagagataggagattgaggagcttgacaaggcaaagatgtaacggagcaataaatatgagtatgtaggaactatgaagtatagaaaagatatacagggcaaagtgcaggaaaaaggaacacggtacctaagagaaaatggagagtcaatgaatcacattaataagagcaccctggagtgaagatccacaaactgcagttaaggtctcatttgagctgtcttgaatccaattctcttgaagctttgtgcttcttgttattctctgtgtcaatttacaataatgccaaattgctgaggtgccttaagggagtgtcttttttctttacaactcccaaaacctaacaaaaatgccattcttagtttatataattgctgtcacatctagaagagccagggtatttcattttcgtattttctgccaaatgatacattggcgatattcttcacatcctaaggtgattgacccttggagctttgaacaattattaggaagcacaaaggagtgttctttttgtagccatttggttctcctttaaaggttgccctcctgtggcaagctagaatacagttacagtgtgaatgcagcttgctttatttttttatttttttttttttatttttttttgagacggagtttcactcttgttgctcaggctggagtgcaatggcgtgatctcggctcaccacaacctccgcctcccaggttcaagtgattctcctgcctcagcctcccaagtagctgggattacaggcatgcgccaacacacccggctaatttttgtatttttagtagaggtggggtttcttcatgttggtcaggctgttcttgaactcccgacctcaagtgaacgcccgcctcggcctcccaaagtgctgggattacaggtgtgagccaccgtgcccggccaccttgctttaaataagttcaaaactctggatttacagcaacagatcattcagccacttttaacaattatttatttatattaccacaaaagtagcatactgttagaaattcaaatactggccaggcgcagtggctcatgcctgtaatcccagcacgttgggaggctgaggcgggcagatcatgaggtcaggtgatggagaccagccagaccaacatggtgaaaccccgtctctactaaaaatacaaaaattagccaggcatggtggcagacatctgtaatcccagctactcaggaggccgaggcaggaacatcgcttaaacccgggaggcggaggttgcagtgagccgatatcgcgccactgcactccagcctgggtgacagagtgagactctgtctcaaaaaaaaaaaaaaagaaattcaaataccatgtattttgaatagtgagaatttacgaaccacaagaaagccacaaacccaaagttaacctgcaaagtttcagttaataccattgccttggataaacacaaaatatctaaggaaaagggctttctgcttcaaagacttgttcacagtctttctctttttccttctccatgagaagctcacccctatgagtccacatagctgccaccaccacaaaggaagccagctattttaaaatgtattcactactttgcttgaggggcagtggggcataacggttaagaccaccagctttattttaagtatactttggcagtatctaccaatattttaaacatacatactttaaggcccaataattccaacatctacaaatctgttctacagaaatactaacaaaagtgcacaaacatatataaggatggtcactgaagcaatgttgataagagcaaaaaatctgaaagatcccaaatggtgtataagaaaagtggttaaataaattatagtacatccatgcaatagtatactatgcaactattaaagaaagtaaggagtgtgtgtatctaatgggatggaaataggcttaatttacattgcttaattttagaaaggcaagttgcagaacagtatattgaataatccattttaaatatgtgtatgtgtatgtgtcataaaaaaaaaaagaaagaaaaagcagccaggcactgtggctcaagcctgtaatcctagcactttgggaggcttagtggggtggatcaccaggtcaggagttcaagaccagcctagccaagatggtgaaacccctctctactaaaaatacaaaaattagccgggcgtggtggcaggcgcctgtaattccagctgctagggaggctgaggcgggagaattgcttgaactcgggaggcagaggttgcaatgagctgagatctcaccactgcactccagcctggacaaagagtgagactccatctcaaaaaaaaaaaggttggaggattgcccaccaaaccattcatattgataaactctgggaagtggaaaagggactttataccttgctatattgttaagtaatataacaaaggcatatcatatttgtaatttctatttatttatttatttattttttgagatggagtctcactccatctacaggttggaatgcagtggcacagtctcggctcattgcaacctctgcctcgcaggttcaagagattctcctgcctcagccgcccgagtaactgggactacaggcgtgcaccaccatacccagctaatttttgtatttttagtagagatggggtttcaccatgttggccaggatggtctcgatctcttgacctcgtgactcacccaccttggcctcccaaagttctaggattacaggcatgtgccactgcgcccaacctattattattatttttttttcgagatgaaattttgctttttttacccaggctggagtgcaatggtgctatcttggctcaccacaacctccgcctcccagattcaagtgattctcctgcctcagcctcccgagtagctaggattacaggcatgcaccaccacgtccggctaattttgtatttttagtagagacagggtttctccgtgttggtcaggctggtctcgaactcctgacctcaggtgatctgcacccccacctcggcctcccaaagtgctgggattacaggcatgagccactgcgcctgacctgtaatttctatttaaataaaacattttaatggagaccaaaaaaaaaaagtaagaagaggcttcagaatcaaactctgattcaaatcctagttccatcaactttttagggttcagtggaatattaagatgaaaatttcctttaccttaacttctgattgtcacttcacagcaaatgactgaaatatctgagcttttctcttatacattgtttttaaacaccagagacaactccctcttaagaggcttgtgattcatcttccattttttgtaaagtgaatcatttccctaatttttctacttgctaataagataataaatatagcatattctgtctctttcacaaattccacccccttttctccgtatctgacttcaagagtccacaacctgggagctgtccaggtaccaattaacatttaaaaagccctcaagttgttcacacaaatagttctattattgctttcctttacagccttggtctgctcaaaaacccacattcaaattggatcacataaactccagcccttaagcacacaggtattgtaggctagaggccgcttttggctacaaacccccttattcatttaaaataacttcattcacaaggttcattgaacagctggtttgtgcccatcacaggccctgacaaaacacttcgcctaacttgtcactaatccttacagcaactctggttgagtgttactagtatcatttaacagataagcaaaccaaggctccaaaggataaaatggcttgaccaagatctcacagccaatgagttggggagcctgctgggaaatctaggattcggggtaactaaaggtcactacggttcttttttaaagaaaattttatttttattttattatctatttagagacacggtctcactgtgtcatccaggtgggagtacagtggcgggatctcggctcgctgcaacctccgcctccctggttcaagccattctccctccacagcctccggagtagctgggcttacaggtgcccgttaccacgcccagctaatttttgcatttttacaaaatgcaccatgttggccaggctggtctcgaactcctgatctcaggtgatccgcccacttcggcctcccaaatgctgggattacaggcgtgagccaccgcgccccaccaggaaacttttaattaactagttttaaaagccaaacagtaaagaaaaacagcattcccctcccccatgcatcccctctctggaattttaactttcctgtgcaatcatgtggtatttttttcaggtatttctgctggtttcccgccgtctttctaaataaccggtttaactggtgtgtggcacagacttaactacgatgtaactaaaacgccactctacagttaactccctctattccttagatttcattcccggggtcacctctttggcctaggtgcacacaccgcgggctccgctctaggtggggcacaggccttcgcccgccgcatgcaccctgggctgcgcagccccagccagcccgacccgggctcagcgacccctgcccccgggaccccgcaccggggctgagcgctcgcctcctgccggccgcggctccacgccctcgccccagaccctttgtcagagagcgagggtcggggagcgagagccagggtccgaggtgaccgtcgtagttggggccgaggtccgtgtggtaggggactgggacaggagtcggagtcgcagggcgagggcccagatcggggctggaagccacaggcctctcacctcgcttggccgagcggccgggactccgggcccgcagcggatggaagcgggcgctgccctgcccggcggcggccggggccttctggggttttcccgcgggcggctcggcagggcggcagcagctgccgcggagaggacgaccgccaccggtgcaaccaggtccccgcgcccctgcccggcctctggggcgcccaagcgggccgtcctcaccgcggcaactccacgcccgcccctccagcccaacctcacagccttgtcctgtccccaagcaaggagtcggcctccctgtccacagggagggaatccggcgcaggtcgcagccggcctctggctttcgtggggagggcaccaaggcttcaggtttcccagctcgcgcgttaccgttcaaaagcccctcctggagctctgaattgaggggagcactccatgccccttcctccaaagagggcgggagtcgcaacactgaagccttgctccaaacaaacccccctaccaaccctctctactcctccctcctgaccccctttctctgtccattatccgtctgagggggtccaggacttgagcagtttctgatttcctttatctttatggtgggggatctgtttcccactaagtatggtatcatcctctttttggcctctcaccaactcttcctgccccctccctacacacattcatcccccaacctccccaaattgcgggttaaaccgattttgaacttacgttattatgagtttgaaaatacttttccccgccgggcgctgtggctcatgccggtaattccaacactttgggaggctgaggcgggcgtatcacctgaggtcgggagtttgagaccagccagaccaacatggagaaatcccatctctactaaaaatacaaaattagctggacgtggtggcgcatgcctgtaatcccagctactcaggaaggctgaggcaggagaatcgcttgaacccgggagacagaggttgtggtgagtcgagatcgcgccagtgcactccagtctgggcaacaagagcgaaactcggtctcaaaaaataataaaaataaagaaaatacttttcccagttggtttgtgtaatatactatgattacatttccttttttgttgttgtggagacggagactcgctttgttccccaggctggagtgcagtggctggatctcggctcaccacctcccggattcaaacgattctcctgcctcagcctcccaagtagctgggattacaggggcccagcagcatactcggctaatttttgtatttttagtagagatgggttttcaccatgttggccaggctggtctcaaactcctgacctcaagtgatctgcccgcctcggcctcccaaagtgctgggattacaggtgtgagccatcgcccccagccatatttcctttcttatcagactttttttttttttttttttccttgtggttagtgattgtctcaatggttggtttgttaaggcttctatgtacccatcattaatttccaccccccaccccacaaatgctttgccagaattgcaaggctccattcattcaaactcatcaaataatacacctattttgttttttcttggaaatatccctcccatgccaatcttaactgttgctcactagacgaactgcacagctgttctgggaattcccttcttcaccatcctgggaattttctttacttctttgtgtgagtcccctttgtcctggattccatgtttgtttttctccctcactttggtagaatatgtcctccagtagctttctgacaaagggtgtggtgaaggggaaaattttttgagatgttgcgtgtctgaaaatatctttttttttttttaagggacgaagtattgctatgtagcccaggctggaatgcagtggctattcacaggcaccagcatagccactgcagcctcaaactcctggcctcaagccgtcctcctgtctcagcctcctgggtgaaagatatctttatttgatctcacttgattaatgtgataatttgtctggttacataattctaggttggaatccatttttccttagaactatgacttgtcttctcatttctgtgttattgctgagaaatctaaggaaatccttacttacaaaagaacataactgtataccttttttgtttgtttgtttgttttttgagatggagtctcactcagtcacccaggctggagtgcaggggcgcgatctcagctcattgcaacctctgcagcccgggttcaagcgattcttctgcctcagcctcctgagtagctgggattacacacgcctgccatcacgcccagctaacacaactgtataccttttgtatgaccctaattttattattaattctggaaactctgaggatcttctatctttgatgttttgaaaatgcaagtgacaggccaggcgcagtggctcgcgcctgtaatctcagcactttgggatgccgaggcaggtggatcacctgaggtcaggagtttgagaccagcctggccaacaaggtgaagccccatctctactaaaactacaaaaattagctggatgcggcggcaggtgcctgtaatcccagctactcgggaggctgaggcaggagaatcgcttgaacctgggaagaggtggttgcggtgagccaagagcatgccattggaccccagcctggacgacaaaagcaaaactccatctcaaaaaaaaaaaaaaaaaaagaaaagaaaaagaaaatgcaagtgacatgccatgctttgatgtgcattttcactcattgtgctagacagagagccctttcaatttagaaactgttgccctcggttctggaattttttttgctttatttttcttgcattactcatatcttccacctccacacactcataccccactccgctccaccccatgcatctttgttctttctttcttaaattcctgttacttgtatattggaatctccaagtaagtctaatcctctcaacttttctctcacacttaactttcttttttcccccacggtctgcaaatttcctcaactctattttccaaacttttcattgcccttttatcaatgttgccttctaaacaatagtgtgctaggccgggtgctgtggctcatgcctgtaatcccagcactctgggaggctgaggtgggtggatcaactgaggtcgggagttcaagaccagcctgaccaacatggagaaactccacctctgctaaagatacaaaaattagccaggcatggtggcccatgcctgtaatcccggctactcaggaggctgaggcaggagaattgcttgaactcaggaggccgaggttgcggtgactcgagactgtgccattgcactccagcctgggcaacaagagtgagactctgtctcaaaaaaaaaccaaaaaccaaaaaacaaaaaacagtggtgtgctactcaatttctaacaaccaactctcagaagcagggggaagaaagccttgatttgtagtgtttgcctattttgatagtacaaatatttccatcatggttgctttcaagctactaacattatatcactaaagatggagtcaggaagagatgcacagtagcatatcatagcattcccaccatatagatagaacacacataaataatctcaagagcatagataataataaaatgtagaaaaataatctggggcccgacgcagtggctcacgtttgtaatcccagcactttgggaggccgaggtgggcgaatcacctgaggtcaggagttcgagacgagcctggccaacatggtgaaaccctgcctctactaaaaatacaaaaattagccaggcatggtggcgggtgcctgtaatcccagctactcaggaggctgaggcaggagaattgcttgaacctggaggcagaggttgcagtgagccaagatcatgccattgccctccagtctgggcaacaacagtgaagctccgtctgcaaaaataataataataatttggaagtaatgagttttgagtatttattttggtttttaatataactgatttaattgtaactttacataataatttaacagtgacagtgttttaacaactggcttttaaaatttctaaaaattcaacagttgattcttacaacctggtatgagccagctcttgtaaactattgcttcaaaataatcatggtctctaatgtaataaaggtaaatcaggggtcgggcacggtggctcacaccggtaatcccagcactttgggaggccgaggcaggcagatcacgaggtcaggagttcgagaccagcctggccaacatggtgaaaccccgtctctactaaaaatacaaaaattaactgggcttggtggtgcatgcctgtaatcccagctactggggaggctgaggcaggagaatggcttgaagccaggaggcagaggttgcagtgagccgagatggtgccactgcactccagcctgggtgacagagcaagactccgtctcaaaaaaaaaaaggtaaatcagaataatcttccaaatgcagttctgatcatgtcactcccttgagtaaagctctatattgcttctgtgcttactgaaaccctcaaggctcaattcacattccacctttttttttttttttttttttttatttgagaaggagccttgctctatcaccgaggctggagtgcagtggcgcgatctcggctcactgcaccctgcacctcccaagttcaagcaattctcctgtctcagcctccccagtaactgggaccacaggtgcccgccaccacgcctggctaatttttgtatatttagtagagatggggtttcaccatatcagtcaggctggtctcgaactcctgacctcaggtgatccacccgcctcagcctcccaaagtgctgggattacaggcgtaagccaccgcacccggcccacattccacctttcttattagttactcaaacaaatattgattaggtatctgctatgggcacggtcttaagcaagcttaagcaagctgctgaggatacaaggatgagtaatatacatttcttttctttttttctttttatttttttatttttttgagacggagtctcactctgtcacccaggctgcagtgcagtggcgtggtctcggctcactgcaacctctgcctcccaggttcaagcaggtcttctgcctcagtctcctgagtagctgggattacaggcatgtgccaccacgcccagctaatttttgtatttttagtagaaacggggttataccatgttggccaggctggtctcaaactcctgaccttgtgatctgcccgccttggcctcccaaagtgctgggattataggtgtgagccaccgcgaccggccatttcttttctttaaggcactccatgatgtagtaggagaaacttaagtatatattactcaatgtgataagaacatgaaaaatatatgcacaaactattataggaatgactagcaaatgactaattcagtctgggggaatctgccatggaaaaacctagcatgtcttcccttgtcttttaggtctcctagtgggttggggtttttatcttattttattttatttttttgagatggagttttgctcttgttgcccaggctggagtgtaatggcatgatatcggctcactgcaatgtctgcctccttggttcaagcgtttctcctgcctcagtctcccgagtagctgggattacaggcatgcgccaccatgcctggctaattttgtatttttagtagagatggagtttttccatgttggtcaggctggtcttgaactcccgacctcaggtgatctgcctgcctgggcctcgcaaagtgctgggattacaggcatgagccaccacacccagctggagtttttattttattaagcgttatatacttaatacaagccataaaggtaaagtatagtgttcatttcaaagactgctagtcgatttttttttaatctacaagatatgtcctcagaaaaaactgctagtttattcagtttagtgccaacttttttttttttttttgaaacggaatcttgcccagtggccaggctggagtgcagtggtgggatcttggctcactacaacctctgcctcctgggttcaaaaaaaaggtaaatcagaataatcttccaaatgcagttctgatcatgtcactcccttgagtaaagctctatattgcgggcagatcgcaaggtcaggagatcgagaccatcctggctaacacagtgaaaacccgtctctactaaaaaaatacaaaaaattagccgggcatggtggcaggcgcctatagttccagctactcgggaggctgaggcaggagaatggcgtgaacccaggaggcggagcttgcagtgagccgagattgcgccattgcactccagcctgggtgacagagtgagactccgccttagaaaaaaaagaaaatgtagaaaatgttcacggaataatgctgaatgatcagagagcagtatggccaggaatggaaggagttaaggtaggaagcactcattctgcaatgcctttatctgagaaattagggatatttatttacttgcaaaaggctccatcttagtgttctttgaaggaggagtcagtagcttaggctcttgaaaaggtctttaagactcagatttccaaactatttattataagccatgcttctctctgaaaaactcttgatgtaacaagagtttcagaatataacaagttccccaattctgtttgggagttttatggtgaactcaatgtctattcatgacatattctgttctcccttcttccgctcagacacgttggtaaaatttaaagatttctaagtaatgaaaagtagcttctaatgaggaaaagggaactgtgcttttttttttctcttggtctcactctgttacccagactgaaacacagtagtgcaatcatggctcactgcagcctcaaactcctgggctcaaatgagtttcttacctttttttttttttttcctgagatggagtgttgctttgttgctcaagctggagtgcagtggggcaacctcggctcactgcaacttccgcctcccaggttcaagcaattttcctgcctcagtctccaaagtagttgggattacaggcatgcgccaccacgcccagctaatttttgtatttttagtagagacagggtttcaccatgttgaaggctggtctcgaactcctgacctcaggtgatccggccatctcggcctcccagagtactaagattacaggcatgagccattgcacccggtccctcatctcctctttcaacaacatttgctgggaagggcaatgagcagtgccccctttccttttttttttttgttttaattttatttatttatttgtttttgagataaggtcttgctccatcatctaggctggagtgcagttgagtgataaaggctcactgcagccttgacttcctgggctccagatattctcccacctcagcctcccaagtagctgagactacagacattgagccactgcacccagccttcttttattttttgtagaaatgtgtgtctcgcagctgggtacagtggctcatgcctgtaattccagcattttgggaggccaaggcgggcagatcacctgaggtcaggagtttgagaccagcctgaccaacatggagaaacccctctctactaaaaataaaaattagccgggcgtggtggcatgcacctgtaatctcagctactcgggaggctgaggcaggagagtcacttgaactcgggaggcagaggttgcagtgagccgagactgcgccattgcactccagcctggacaacaagaatgaaactcagtctcaaaaaaaaaaagagccgggtaaggtggctcacgcctgtaatcccagcactttgggaggccgaagcgggcagatcacgaggtcaggagatcgagaccatcctggctaacacggtgaaactccatctctactaaaaatacaaaaaattagccaggcatggtggcgggtgcctgtagtcccagctactcgggaggctgaggcaggagagtcacttgaacccgggaggcagaggttacagtgagccgagactgcgccatcacaccccagcctggacaacaagagtgaaactcagtctcaaaaaaaaaaaaagagccgggtgaggtggctcacgcctgtaatcccagcactttaggaggccgaagcgggcggattacgaggtcaggagatcgagaccatcctggctaacacggtgaaactccgtctctactaaaaatacaaaaaattagctgggcgtggtggcagtcgcctgtagtcccagctactcaggaggctgaggcaagagaatggtgtgaaccttggaggcggagctggcagtgagccgagatcatgccactgcactctagcctgggcgacagagcgagacgctgtttcaaaaaaaaaaaaaaaagaaaagaaaagaaagaaagaaagaaatgagggtcctgctgtgttgtccaggctggtctcaaactcctggtttcaagtgatcctcccgacttggcctcccataggcatgacccatggcacctggttccagctttccttttcctctagtatttggttgtcatctcttacctccctaacatttcaaggttcctgggaaaatgaaattagttcttcctcactaaaatgtggcaacagggccgggcacggtggctcatgcctgtaatcccagcactttgggaggccaaggcaggtggattgtttgagatcaggagttcaagaccagactcacgaacataatgaaaccccatctctactagaaatacaaaaattacaggtgtgccatggtggtgcgcgcctgtaatccaagttactcaggaagctgaggcaggagaatcgcttgtgcctgggaagcggaggttgcagtgatctgagatcgcgccactgcaatccagtccgggcgacagagtgagactctgtctcaacacaaataaataaataaattaattaattaattaattaaaatgtggcaacaattgttaaacacatgagtaattatattaacagcacaaacttggatcccctggattaagtactctggaaaaagacagacagattgaaaaagaatatgactactcacattaaaaaaccaaagaccacagctgggcagggtggcagtgcacaacaggagcctgagtgaggcagaaggatcccttgagcccagggtttgaggtcagcctagtcaccatactgagagtctatctcaaaaaaaaaaaaaaaaaaaggctactggattacaacaattcacgtttagcttactatagatagagatggatatttacagaaataaatatagatttgtgtgtatatatgggttagtatacatacatatatcttagctctgtctactgggagaggctggaagcaatgacaccccagaagcaatgagtgtacccagcaaccacatcttggtttctttttctctgttttttttttttttttttttttttttgagatgagccactgcaccaggccttggtttctttttaattttttttttttttttttgagatggagtcttgctctgtcgcccaggccgtagtgcagtggcgcgatctctgctcactgcaagctctgcctctcaggttcacgccattctcctgcctcagcctcccaagtagctcggactacaggcgcccatcaccacgcctggcctgacttgaggtcaggagttaaagactagcctgaccaatgtggtgaaaccctgtctctactaaaaatacaaaaaaaaaaaaaaaatagctggacgcggtggctcacacctgtaatcccagcactttgggaggctgaggtgggtggatcacctcaggttgggagttcaagaccagcctgaccaacatggagaaaccccgtctctactaaaaatacaaaattagcaggccatcgtggcacatacctgtaatcccagctacttgggaggctgaggaaggagaatcgcttgaaccccggaggcagaggttgtggtgagctgagattgtgccattgcactccagtctgggcaccaagagcaaaactctgtctcaagcaaaaaaacaaaacaaaacaaaacaaaaaatagctgggcgtgttggcaggagcctgtaattctagctattctggagattgaggcaggagaatcacttgaagctgggaggcagaggttgcagtgagccgagatcatgccactgccctccagcctgggcttcagagctagaccctgtctcaaaaaatatatatatatatagtattagattataccccaaagtataaaataaatacccatgaatccatactgatataaagtattgaataaatatagaaatggaagagaaggtaaatatccacttcacgaaagaattccaaattattcatacagatacttagccatcaaggtggtagagcttaattcaccacaaccactattaccacaccttgagtgtagtgctatacttggggacttgcttcaaaagaatataggagagaaaaagtaggagagaaagagtacagcagagaaaaagagtacaggagaaaaaagtatggagaaggttgagaaatgttggacaggtgatcaagattaacgtcatcaataacaatcatatggatatcaacctggatatggtatgataacaatggtacttcccttttgtgatctccctccataaaacctataagtgaactccaatcattagaaaaacatcagacaaggccggatgttgtggctcatgcctataatcacagcactttgtgaggccaaagtgggtggatcacctgaggtcaggagttcgagaccagcctggccaatatggtgaaactccatctctactaaaaatacaaaaaattagtctggcatggtggcaagttcctttaatcccagctacttgagaggctgaggctggagaattgcttgaacctgggaggcagaggttgcagtgcgccaagatggtgccattgcactccagccagggcaaaaagagcaaaacttcctctcaaaaaaaaagaaaaaagataacttttaaattactatatggtaagtgtaatgcaaagtttagtttttaattttgtttcacttcctaagtgttgtatattttcttaccaggaactcttcttgtgttttttttttttttttttttgagacggagtctcgctctgtggcccaggctggagtgcagtggcgcgatctccgctcactgcaagctctgcctcccgggttcacgccattctcatgcctcggcctcccaaaatgctgggattacaggcttgagccaccgccccggccgaactcttctatatcacttgacatgttttgagctaaatttgtaacccttttttgcacccattagaagataacaccatttgccttttatttttggataattcaggaataaaaaatggatctcaagctttataaaacttacaattctaggctgggcgctgtggctcacacctgtaatcccagcactttgggaggccaaggccggcggatcacacggtcaggaggtcaagaccatcctggccaacatggtgaaaccctgtctctactaaaaatacaaaaattagctgggcgtggtggtgcgagcctgtaatcccagctactcgagaggctgagacaggagaattgcttgaacccaggaggcagagattgcagtgagccgagattgtgccactgcacttcagcctggcaacagagtgaaactccgtctcaaaaaaaaaaaattataattctatagaaaaataacatttgtataaatttaactttggtgtaaaaaagtgaatttaactttggtattgcacactggtaatttctgtgagttctcagaattaaagaactgaggtaactttaacaagaacctacattaaagcttagactttaccactacataatatatgcctttaggaaatatgtacttctacaccctaaatacgttttttgctttctttttgagacagtctggctctgttgccaaggctagagtgcagtggcatgatctccactcacagcaatctccacctcctggcttcaagcgattctcctgcctcagcctcccgagtacctgggactacaggcacgtgccaccaagcctggctaattgtttgtatttttagtagagacggggtttcactatgttggccaggctggtctcaaactcctgacgttgtgatctgcccgtctcggcctcccaaagtgctgggattacaggcctaagccaccatacctggccctaaatatgttgttgttgttgttggtttgagagagagtttagctcttgttgcccagggtgcagtgcactccagcctgggcaacagagtgagactctgtctaaaaaataaataaataaatagataaataaataaataaataaaatcgtattatgaaaataagaacaatatttgtaataataacaactagctggccgggtgcgttgctcacgcctgtgatcccagcactttgggaggccgaggcgggtggatcacgaggtcaggagatcgagaccatcctggctaacatggtgaaaccctgtctctactaaaaatacaaaaaaattagccaggcatggtggcgggtgcctgtagtcccagctactcgggaggctgagggaggagaatggcgtgaacccgagaggcagagcttgcagtgagccgagatcgcgccactgcactcactccagcctcggtgacagagcgagactacctctcaaaaaaaaaaaaaaaaaaaactagctaaaaataaaggtctgcatctcttaatatgttctgcttaacagcagtaaattagcaattgcaaaataaaggttaatttataaactctgaatggaaatccagatatccagactatagtagtattatagaagtgatggctgggcacagtggctcatgcctgaatcccagcactttgggaggccgaggcgggcggatcacctgaggtcaggagttcaagaccagcctgaccaatgtggtgaaaccccgtctgtactaaaaaatacaaatttagccaggcgtggtggcgcatgcctgtaatcccagctactcgggaggctgaggcaggagaatcgctcgaatctgggaggcagaggttgcagtgagccaagatcgtgccaccgtactccagcctgggtgacagagtaagactcggtctcaaaaaaaaaaagaagtgatgataatacctgacaggttgaccctaataatcatgttgacatgatttatgaagtatgatgacataataatgctgtttttttccctagaaaatgaagaaaacataagttcacacaaagattagcggtattatcagcaaaactaattttttttttctgggcagggcatgcatgaaatatttacagaattatctttttcattttctttttctttttttgagatggagttttgctcttgttgcccaggctggagttcaatggtgtgatcttggctcactgcaacctccgcctcccaggttcaagcgattctcctgcctcagcctccccagtagctgggactacaggcatgcgccatcacgcctggctaattttgtacttttagtagagatggggtttctccatgttggtcaggctagtcttgaactcctgacgtgtggtgatatgcccacctcggcctcccaaagtgctggggttacaggcatgagccaccacacccagccagaatgatctttttcatctgcatttcattaccatgaaacaaagtaatcttcattagtcttgtcataggtttttattttttattttattttattttattttattttattttattttattttattttgagacagagtcttgctctgtcaccaaggctggagtgcagtgctgcagtggcgcgatctcagctcactgcaacctctgcctcccaggttcaggcgattcctctgcctcagcctccagagtagctgggattacaggcgcctgccaccactcccagctaattttttttttttttttttttgagatggagtctcgctctctcgcccagactggagtacagtggtgtgatctcggctcactgcaagctccgcctcccaggttcacgccattctcctgcctcagcctccccagtagctgggactacaggcgcccgccaccatgcccggttaatttttttttgtattttttaatagagacagggtttccccttgttagccaggatggtctcaatctcctgacatcgcgctccacccacctcggcctcccagagtgctgggattacaggcgtgagccaacacgcctggcctaattttttgtatttttaatagagacggggtttcaccgtattagccaggatggccttgatctcctgacctcgtgatctgcctgcctcggcctcggcctcccaaaatgctgggattacaggcgtgagccaccatacctggccaggtttgtttttaatgctgtcaaattttgagatgagtatatcccagaatacactattggtgctattttagctggttatttctcattatcagacttgggaagacagcatagtatactgtggtgattttcaaaaaaaattctttttagcaagtagaaccattatgttcaaacaaattataaaacagtcacaagtagaacatctctgatgaaagacaaatgggaatgcagagcccaccatattgcagcttcctcttctcccggagggtagcttcctgaaactctggggttccagaaagacagcttggatactttagtcatactggaaaacatggggttttgagccccctatagctgggtttaaactccagctctctcatttgtgggatggtgtaatggtgggggagttacttaatctctttgagattcagtgagaagtatctgagggggttgactaatactaatagtaactaacattactgtttatgattgttgtgtggacaggttgctcaataaatggcaacttacttcacatttgtttaaagttaaatgtaaaacaacttgtcccacagtctgaaaaacagccataatagttttttttccagacataggcctccagaaattcaggtttagatatttccactttggctcaggtggttttttttctccccaggttattagtgtcaagtttcttcctgtcccaggagttctaactatggcttactaacatccttattatatcttgttaactctagataaacacacatacacaaatcagtggtttattatgaaaaccctataatatacagtgaatgttccatggttctcatgcttttctttcttacacaaagaaaacaaaaatgagtaaacttttggttttaagagttgaacaggactgttaaaactgttccttcaaactacattttattaggcaggtcattactatttttatcttggaggcctttttttacttattattatttttgagatggagtcttgctgcattgcccgggctggagtgcagtggcacgacctcagctcactgcaacctctgcctgccgggttcaagagattctcctgcctcagcctcctaagtagctgggattacaggcatgcacccccatgcccagctaatttctgtatttttactagagatggggtttcaccatgttggccaggctggtctcgaactcaggacctcagatgatccacctgacttggcctcccaaagtgctgggattccaggcatgagccaacacacccagccttttacttatttttatttctttttctttttctgtttttcctattcagataatcaatcaccagttgacattctttttaaaaaaaatcaaatttgattctatttctttaagaacttatcagctaatataacatgtcagtttcctcaagcaagacaaaattttttttcggatatagcctttgttgactttttttttttttttaagatggcatctcactctgtcgcctaggctggagtgcagtggcatgatctcggctcactgcaacctctgcctttcgggttcaagcgattctcctgcctcagcctcccaagtagccaggactacaggtgcatgccaccacacccagcaattctcatgcctcagcctcctgagtagctgggattacaggcacccaccaccatgcccagctaatttttgtatttttagtagagacagggtttcaccatattggccaggctggtctcgaactcctgactttgtgatctgcccaccttggcctcccaaagtgctgagattacaggtgtgagccaccacacctggccttgttgacttattttaatagtctcagcgctaaattttaaggaaatgaggatgaatggaggatagacactgtacaagtaaaagggaggcttgataccttggttattttaagtcaagtgcattcatactgatgattattcatttcagcacatcagaggcaatttttttttttttttgagacggagtcttgcttgtcacccaggctgcagtgcagtggcgcaatctcggctcactgcaagctctgcttcccgggttcacaccattctcctgcctcagcctcccgagtagctgggactacaggtgcccgccaccacacccggctaatttttttgtatttttagtagaaacagggtttcgccattttatccaggatggtctcgatctcctgaccccgtgatccacccgtcttggcctcccaaagtgctgggattacaggcgtgagccacagcgcccagccttagaggcaatatttactgatttttttttttttttttgtgagatggagtctcattctgtcccccaggctggagtgcagtggcgtgatctcggctcactgcaagctccgcctcctgggttcacgccattctcctgcctcagcctgctgagtagctgggactacaggcgcccgccactacacctggctaatttttttgtatttttagtagagacagggtttcactgtgttaaccaggatggtctcggtctcctgacctcgtggtccgcccgtcttggcctccctaaatgctgggattacaggcttgagccaccgtgcccggcctttttttgttttttgttttttgagacggagtctttctctgtcaccaggctagagtgcagtggcacgatccaggctcactgtgacctctgcctcccgggttcaagtgatttccctgcctcagcctccccagtagttgggactacaggcacatgccaccatgcccggctaattttttgtattttagtagagacagggtttcactgtgttggccaggatggtcttgatctccttaccttgtgttccaacttagcctcccaaagtgctgggattacaggcgtgagccaccgcacccagcctactgatctttcttgacttagacatgacatatgctacaacttttttttttttttttttgagacggagtctcactctgtcgccaggctggagtgcagtggcatgatctcagctcactgcaacctccgcctcccgggttcaagcaattctcctgcctcagcctcccgagtagctgggactacaggcaagcaccaccacgcccagctaatttttgtatttttagtagagatggggtttcaccatgttggccagaatggtctcaatctcttgaactcgtgatccgcccgcctcagcctcccaaagtgctgggattacaggtgtgagccaccgtgcccggcctgacatatcctacatcttttatctttaaaactcttggcaaggtgtggggctcacttctgtaagccccacattttcggaggccaaggctggtcgaccacaaggtctggagatcctgaccatccaggctaacaaggtgaaaccccatctctactaaaaatacaaaaaattagccaggcatagtggcatgcacctgtaatcccagctacttgggaggctaaggcaggagaatcacttgaacccgggaggctgaggttgcggtgagccgagattgtgccactgcactctagcctgagccacagagtgaggctccatctcaaaacaacaacaacaacaataacaacaaacaaaactctttatttttctggcatgatagtgaagcatgagggctccagagacactgcctgggttaaaaatcccggtttgtgcaagcttcttaacaagtcttgctgttatttcctcatctatgaaatggagatattaataaatgtctacctcagaggattggtgtgagaattgaatgttaagcttgtaaaaacttaaagtattgcctggcacatagtaagcactcagtcattattatcctaatttatatttgtgcgctggtgtccaactttattcatcaagactcattggatgaatcctgattctatgccaggcacagtgatagacacctcagctaccaaagcatccatcatccgtgccccaagagcttaacagtaaagtagaaagaaaaagacttgctgctataacacaaaggttcttaacttgaacaggcttcaggaagtctgagaacttgaatgacaaaaaatatatatatttatttacactaacctctagctagaatttagcatctccttcaactactaataggtgacaaatcatagtagtgttagcagtgcctgtggctttgttaccaagagaacttactggtatttctctcgggaggccaaggttgcagtgagccaagatcgcgcccttgcactccagcctgggtgacagagcgagaatccgtctcaaaaaaaaaaaagactacagaggatagtgtaacaaacaagaggggattctgaactttttgtctgaatataaaatatagcttgtccttaacaacaggcattccttatttcaggtaagaaggtatacctaatttcagatgtgttcctgaaatgccaaatactatatacgtcatttgcagagatcactttcttaagtagcaaaggctttgataaaacctgtactttaggtatttaatcattacaaagataactagttttgtaaacaacttgaataaccattccagagacacttgttttgtaaacagtgttttgcagttaactatagagaacccaagtagacatttaaaaaatgctgtttagagtatgaaatggttctatgtttataggttgggatttttgaaattttaacgtaatataaaaattggaagaacatccttagagatcatcttgtccaacctgaaattcaaatcattagctcaactccaaaccaatctgtgccagaagactgaaatgggcctatgtgtctatcgttcaaagcaagacctggccaggcgcggtggctcacgcctgtaatcccagcactttgggaagccgaggcaggtggatcacgaggtcaggagatcgagaccagcctggccaaaatggtgaaaccctgtctctactaaaaacacaaaaaattagccaggcgtggtggcgagcgcctgtaatcccagctactctggaggctgaggcaggagaatcgcttcaacccgggaggcgcaggttgtagggagacgaagtcgcgccactggcactccagcctgggcgacagagggaggctccgtctcaaaaaaaaaaaaaagcaagactcgcaaaacaccggattccttctcagctttctgagctgaaaaggtatagatcctaaagaagagaagagtgtatgtaagtacttctcaaccagtttacctctctgaccactcttacggtgtttgggggcaacaaactaaggatctagactcgctaaaccgctcgctgggtccttctctccccacaatgcaccggggccagcaggaaggccgctccgacccctaattttcccgcgaattcagttcaaagaggcggccgggcccgcgatcggcagcgcgcacgggccaaccaagccgcgcctccgcgagaagcgcctccgcgtgactgacgggggaatccgcgggccaacgggctgggcggcccggcggtgcgcgctcccgccggccaatcagagcgccgggcgggggaagtgggcggagcgaggccagggtagggtgagcggcctccgaagcggagcggggctctgaggagacactttttttttcctccctccttccctcctctcctcctcccttcccttcccctctcctcccctctctcctccttcccccctcggtccgccggagcctgctggggcgagcggttggtattgcaggcgcttgctctccggggccgcccggcgggtagctggcggggggaggaggcaggaaccgcgatggcgcctcagaagcacggcggtgggggagggggcggctcggggcccagcgcggggtccgggggaggcggcttcgggggttcggcggcggtggcggcggcgacggcttcgggcggcaaatccggcggcgggagctgtggagggggtggcagttactcggcctcctcctcctcctccgcggcggcagcggcgggggctgcggtgttaccggtgaagaagccgaaaatggagcacgtccaggctgaccacgagcttttcctccaggcctttgagagtgagtgtgtgcgaggctttgagggcaggaagacccactctgccaacaccggggatgggacactctgctgggcccccttcctcctcgggagtccacttgtgtggtagtggagggaggaattgaggggatgtccccctttcggagattacgtctccaggggatccggagtccagggccttgggagagctggaaaagagggtccgggcgggttcttgactcccccaagattgacgcaagaggctcgggactggggccccacgttcagagcaggcggcttttagatgaggaggtagcagttgaactgagccgcagtcacatcccgagactggttcttgttttctttcatgcctttcggactctagaaatacaggggtttcggttgtagcttttgaggggcaaaatgaagcctgtgaagggatgagtgcagtggaaccgaagaaagtgtccttagtctgaaatgccttcgcgctaacttggtgctgcaggttcctatggcacctttggatgcttaaaacccttcaaatctatccacccattttgtggatatgtaaactgagccagagagtggtcaagcatcttctctggagacgaccccggaattctgctttttctacctggcttacagaacattttcttgcgtcaatttctgtttctaagttctgtctggaaggtgaaactgacttatttggaaaggagagcaaggtgtctggaaacaaacaatagaatttattaaaaacatcgtgactatgaataatcctgattgttctttaaggaatgttatatcctgattggttcccttttttgcttttgtgtgttataatttgggtgatctttaatagctaaataatcttacagaaacttgaataaacttggctctaccgcccagtgtccttatttacagtttcactgtggcatatgttaagggcatggtatcagctgtgcttagaaagacgtattacgttgtttaatacccttccttcattctctctcattagtgcttcatgaaattctaattggaacttaatagaaggaatttcagtttttatggaaacgaatattgaacctgcttcagagagattcacattattcacgtatttcttagtatactttgaaatatctagagaggctttaattggaaataggatgtagaactgaagggcagtggtgacaataatgatacttgtttgtaccccttctaaagtatctcatctccctttagttaatttaaaataaaaccaattgaagatttaggtggaaattttaaaagttctttctgaatgttaagacacatcctccaagaaagttttaactatttgcgttctgatgagtcgacctcagggaagtcaagtgtcattaagagctagatctggtcataaaacaactcgaagttgtttactggaaagtttaaatacttgaatgtaattattcacatagttatttctatttggtttattctgatactgctgtataatgacctaacgtgacactaataggtcattaatgtaactgatataatagtatatgtatttttcatcgacttaagtcctgtataacaaattacattttaactaatttgaaatttaattcaactcattttaagcgttagaaagactgttttgtgaacctgtcaattgtgtaaaaaatgtattgaggtaatatttatattgaacaaaatagatacaactttaaattataattaggaatatttattgagaatttttgctgcagtttgtgtccgagattcatttcaatattgactgacttttgagtgcagtggatcccacctgtaatcctagctactctggaggctgaggcaggaggatctgttgagcccacgagtttgagaccagcctgggcaacatatcaagaccccttttcaaaaaaagaaaaaaaaaatcttgactgactttcatcatacctgtattaggaatgtctggatctgtattaggatgtcatcatatctgtattaggatgtattaggattctgttttggctgactacaattttttttttttttttgagacgaagtttcgctctttattgcccaggctggagtacaatgacgcgatctcggctcacggcagcctccgcctcccaggttcaagtgattctcctgcctcagcctcccaagtagctgggattacaggcatgcgccgcccctatgcctggctgtttttgtatatttggtggagacagggtttctccatgttggtcaggctggtctcgaactcccgaccttaggtgatctgcccaccttggcctcccaaagtgctgggaatacaggcatgagccactgcgcctggccggctgactacagattttttaagtgaccatttaaaaagtgaaattttcatcttgtttggcatcaatcaatagttcttttgttgactccagctgcctattacagctgctttttggaagaaaatcggtaataaatagtttaaattagctaagttaaatgagtacaactacttctcttgagttctgctcggtaacaataactatcttagaaaggcttaagaaaaatattgtagagaaccttcagtataaaaagcatagatgaactttgtgaatgtatgccattgattgaataccttttgatcttactgtgcatactttcttgatgtaaatatttagtgcgatataaatagtgcgtgatttccatagcagatgataagtttatattgattataacatggtctcggttgatatttttctgacaagtaagtttagatcatgtttggattttgtttcctattacctagagccaacacagatctatagatttcttcgaactcggaatctcatagcagtaagtagtcaacaaaattcatcaatattatttctctcttataactgcatctgtattcaattttaacatttttaaaactctttttgtagccaatatttttgcacagaactcttacttacatgtctcatcgaaactccagaacaaacatcaaaaggtacattttatgaatcttatttcaagctgatcaaaccatgttagttttattttaaagtactatttctcaaaattaaaaaaaaaaacgaacaaaaataagtactatttctaactaaagatttaagatgaaaactgaagtgagagagtgactggttgaattggttgcacagtggttttctatagtataatctttgtaagtctcaggttgttattagctttttttttttatcctctaatagaaatgaggctgggtgtggtggctcatacctataatcccagcactttgggaggccaagttgggcggatcacttgaggtcaggagttcgagaccagtttggccaacatgggaaaaccctgtatctactaaaacaaaaattagctgggcgtggtggtgtgtgcctgtaatcccagttacttgcgaggctgaggcaggagaattgcttgagcccgggaggtggaggttgcagtgagccgagattgcgccgttgcactccagcctgggcaacagagcgagactctacctcaaagaaaaaaaaaacaaaactgattttagtagtgaagtgaataaagtgattttactgattatatttttactctgtgccatgggttatttctctttttttgtttgtttgtttttttttgagacagagtgtctgtccaggttggagtgcagtggcgtgatctcagctcactgcaagctccgcctcctgggttcatgccattctcctgcctcagcctccttatttttttttttattgttgttgttgttttgtttttggtgttttttttgagagaagtctcactcttgtcccccacgctggagtgtaatggtgcaatctcggctcactgcgatctctgcctcctgggtttaaacgattctcctgcctcagcttcccaagtagctggggttacaggcgcctgccaccacagctggctaagttttgtatttttagtagagacaaggtttccccatgttggccaggctggtctcgaactcctgacctcaggtgatccacccgcctcggcctcctaaagtgctaggattacaggcatgagccaccgtgcctggcctttttttttttgaaacggagtctcgctctgtctcccaggctggagtgcagtggcgcaacctcggctcactgcaacctctgcctcccagattcaagagattctcctccttcagcctccttagtagcttggactataggcgcgtgccaccatgctcggctaattttttgtatttttggtagagatggggtttctctgtgttagccaggatggtctcgatctcctgacgtcaggatccgcctgcctcggcctcccaaagtgctggcattacaggagtgagccaccatgcccagcctgaccttctttttctttttttgagatggagtttcgctcttgtctcccaggctggagtgcagtggtgcgatatcggctcactgcaacctccgcttcccgggttcaggcaattctcctgcctcagcctcccgagtagctggaattacaggctcccgccaccacacccagctgattttttgtatttttagtagagatggggtttcactatgttggccaagctggtctcaaactcctgacttcaagatcttcccgccttggcctcccaaagtgctgagatgacaggcgtgagccactgcgcccggcctccgctggttattttcaagtttgatagaagttgaggatttaaatatttactaaagggctcagggtaactatatttgttacgtaaaatttaagttaatttttgattattatgtgtaatttgaattaggtcctgtaatggtgggttcagaaagtctcattttatatctttggttttttttttgttttgtttttatttttttttgagacagagtttcactcttgttgcccaggctggagtgcaatggcgcaatcttggctcactgcaacctccacctcgcgggttcaagggattatcctgtctcagcttcccaggtagctgagattacaggtgcccaccaccacgcctggctaattttttgtatttttcatgaagttggggttttaccattttggcctggctggtcttgaactcctgacctcaggtgatccactcaccgtggcctcctgaagtgctgggattacagacctgagccacagcgcccggccttggtggtggtcttattgaaggggaaacacttttgaaatcaataggatgaaggttttttaaaaacaatgaagtcttaaatcattagattttaaagtggggtctggaggtggaagacagcttatttttgctgtgtaacatttagtacttaaccatacataattatcaatgcaagttttttgtcctaggtgcaagattatatttatttgagagtatcaggtgaacaagtttacatttaaaggcgagaattgtgttaagcatttggtattgtcattatagttttagtaaaaccatcaagttatctcgatagagtttgaaactaagctctttggtggactgctactgtttattaagtaggtatcacatttctatagcaagacatagttgagttgtgtaaatcttgtattttgaaggattgaattgtgaaaattatttgtcttttggcaatctttctgaatagagagcgtgcatgagcaagtttgcattgcagttaataggtgaaaattgctgagcacctaagtaactaaaaaggaggtgatgaattaggttacagaattagttttgtccaccctttacctgtctactccattatttgatttttgccagcattcagcatgctttttctgtaaaggaccagtaaatagtaattattttaggctttgcggccagggtgcaaaattgaggatattatgtaggtacttaattttaaaagaaagaaaaaatttacagttttttaaaatttcagtccgaaatgtcaatctgtaaattttttgttgattaaaatacaacaatataagatagaacattttgtaatacaggcctacaaatgagaaatgagaattttatttttgtgagggtaggggagataacatttagctgaattggggttcagagttagtgttttctgtaatcaaatcgattgctaatgtttatctgtaaaaaccgttcttaccttccgggctgtacaaaaacaggcgataggccagatttgaccatggtccatagtttccccacccttgatttattctataaaactagtagaattcgactaactgttttgtttcatcaaagcttttttttttttgagacagagtcttgctctgtcgtctaggctggagtgccgtggcgcaatttcggctcactgcagtcttcgcctcccaagttcaagcaattctgcctcagcctcctgagtagctgggattacaggcgtgtggcactacacccagctaatttttgtatttttagtagagacagggtttcaccatgttggtcaggctggtctcaaactcctgacctcatgatccgcctgccttggcctcccaaagtgctgggattacagtcgtgagccaccgtgcctggccatcaaagcatttttaatatagaaggtcagttgagttgctgcctaggatgcaacctgatcttaatttacaaagtaattaaattattataaaataagtttgcattcatagattaaaaagtacacatttattttattattattatttttttttgagatggagtttcgctcttgttgcccaggctggagtgcaatggtgcaatcttggctcactgccacttccacctcctgggttcaagtgattctcctgcctcagcctcccgagtagctgggattacaggcatgcgccaccatgcctggctcattttgtatttttaggagagatggggtttctccatgttggtcaggctggtctcgaactcccgacctcaggtgatctgcccacctcggactcccaaagtgctgggattacaggtgtgaaacaccacgtcctgctaaaaagtacacatttaaaatctaagttccattttcccgtcatgtttattaatttgtcccattgcaggatatgtttctgttgtccgcatgggtagagataattttaaaagcttggttaagtaagaactgattttcttaattattgccctttaggttaaaaaaaaaaagtctggggaatttttaagcaatctgccagccaagaagcaaatttaagtcccacctagtttagttcctacagaaatgggtaggaataggctaggcatggtgtttcagacctgtaatttcagcatttcgggagactgagttaggaggattgcttgtgtaacatttagtacttaaccttacgtaattatgaatgcaagttttttgtcctgggtgcaagattatatttatttgagcgtatcaagtgaacaagtttacatttaaaggcgagagttataggtcagccctggcaacatagtgagaccctatatctacaaaaattttaaaaaattagctgggcgtggtggctcatgactatagtcccaaatactcaggaggctgaggcaggaggatcacctgagcccagaagttcgaaggttgctatgaatgtgccggtgcactctagcctgggcagtagagggagatggtgtctcaaaaaaaaaaaaaaaaaaaaaaagtatgggaatcatttaatcatcttgttagatgcctgatcttattacttattaggactaattattaagaaattaaagcacaactcatttgctgttgtcttcagcgtagttggtgactttggaaggtggcagatttagcccagtgattgtcgtttctcaaaatgttttcagaactcgttttttactattacaacaacataatatccattgttggaataagcatatcactccctttaaagtcatactctcagtcgtgatattaattctggtatatttattaaagtcagcttgtgctttactctttctagaagtattcaacttctataggctaacactgccccaacaaagtaaaaatataggtcacgagaagggcatcttttattgaatccattttgctagatttcgtgtgagctgtttctgaagtctcccaagaaaattttctgaaatttcttgaatttttaaatatgctccttttcgatgaccttttgataattatttccttctttaaatctgacctacagtaacattacctttctaaagaacagaaatccttggtgttgggggaggagcagcttttatatagttgcttatgaggttggttttgtttttttcctaaggaaggctgggttgcttttgtgatcttatctatttcaaatggttaatcaattctattcacttctcctgtatacagcttcataaaggtagaagagatgaaccttagaacgtacagtctttttctgcagacagaatttcttaatcattacataaacattattcggaaaagttttcagtagtttcatggccctcctcaatagtaactttcagtatttatactgaatagctctttgcaactagcctaaaagagtcctttatttttgttcttttttctctcttatctgtggagattgaaaatatattgccatccttcagaaagcgcttcttactatactctattggatgaaactttaatattgaagttttcagtaactctaaaggtaaagagagaagctttttttcccttaagatctttactatggaggctcttctcattcacttgaaatatagattgtatcaattctgctctaatatcagtagtttactatatttacattaacatttctctactgataatttttacagtagttgaatacaataaatagctcttttttggccaggcatggtggctcacacctttaatcctagcactttgggagacaggggtggatagatcacctgaggtgaggagttcaagaccagcctgaccaacatggtgaaaccctgtctctacaaaatgcaaaaattagccaggcgtggtggtgcacacctgtagtcccagctactcgggaggctgaggcaggagaattgcctgaacccgggaggtggaggttgcagtgagccgagatcacgtcattgtactccagcctgggcaacaagagtgacactcccatctcaaaaacaaaacaaacaaaaacaaacaaacacaaaactctctttgaggaatgagattattcgtaatttttggtgtctgcattcaagcattataaagtaataaattgatgtggagtacatttggcttttcaagtcctaaagaggaagggactatatgagtataaagagaaacattttttctaattaaattatatatgggtatagatttttagactcttatctctagaacatgtcatagaccaccttaagaactaagatgaggcttgtttttacaatccattcattctttaattgctttgagaagttatacttaagtttctattttttgggaaatagcttttttctcttaaacttgtcaagttaaaaggtagtagttttattacgatttgatggatcattccctaacttcaaaattttttcatgatgtcaacaactgtctctttaatatgacatatcattgagctttaggctttgctgataatctttgaggataccttgtgaacttcaaatatattttatagaatatttctttttttatgtgatggtgctagtacatatttgttgtgttgcttagtagacgtgttaagtgtttcagaatacacataatttatatttgtttggcttaattcaacagatacttgaatacctaccaagtataaggcactatgccagcactgcatagctttccttgaagaagagcaattactgcccttcaggaatatataatctagtaggagaaataaaatatttacatgagttttacgtgtaggaaactgaatgaaaagtaagtgtcaaaataaatataaaccaagtaccatgggtaaggagaaatcactggtttgggaataattgggtaaaaggtttaatgaaaacaagttagcgttttagatggggcttgaaggctcgtgtgctgtattatacaccgtctccatagtattcattgttatggctaatcatccataatttatcttactaaaaataatcaaaatctggtttccatcttgcctattagagtgacaataaagtataatttgtttctttttcccagttgagaagtgattattttgtttatctgtttcttccaggaaaacatttaaagttgatgatatgttatcaaaagtagagaaaatgaaaggagagcaagaatctcataggtaagataatctatcagtttacattaagtgatatactttaggaaagaggaaaaattacagtgatcattttcctagtgatcaccttgatataaggagttagaaggaatcttagaggtcagtttggtccaaactcacacacaagtcagaaattaatttctgtagcattcctggcagagaatacttaagctgtggcttgaatacctccagtgtagttgtatttattattgtttatctttattaccagtttcttccattttgagtgaaacctctgacttctgccgttggtcttaactctaccacctcatttaaagagggatactcacatttatagtatatgtgctaggtactgtggcagggacttcacaatatcacgtatcttgtaagttattctcaaatatgagaggggttctcttttttttccatctttttcttctcatttaaatctatcaggcaacatattcataacttttatttcatatttgaaatatgtttctcacatagtttcagaaacttgaacatttggacagaatctacttgttgtacattatcaaatatatacctagaacgaatccctaaatgttctgactagtctgatatctgtctactctagatagtatgcttctatttattttttgacacgtaaactttattttttgatatttttgatagaaaattgaatattctaaggagaaacagcagcttgggtggtgtttgttcattcattaactcctttagagagtgcagaactaaaaatattagattcttgaaaaaatagagttggaaaatttgtcacaatgcatttttcttttcctcctagttttaaatcacagcttacgaatttagataggatatacacttaatgatgcatcatttatgcatctcattgttttcccattgttctgttgactggtaaaagacttcctttttttcagtttggcttccttctattttaagtttggctttggaattaagtgatttttttacttggattataaaatgatattttttattttatatcctgcaatcttgtggggttgaagtataatttatatttccatgtctaggcaatcctgacttgtaaataaactgtgatagtccattctagaagctgagatcctgaattgttacctgttatatctgttaatgcccagggagaccctataagatagaactgagaatattcgcagtgcacgcacatttttctttactagaatttatattccagattcttgtctggtcacccaccctagacagagctcttgggatcctcagggccttttttacttaaaatacagactgtagtaagatcctggtctgacctccctgcttcttttctcctgaccacattaaaagtttgccctatagtcatttcagggttcaagtgagaaggaagcatgaaccaacaacaggaacactggacccttctcttcatcttcctcatcaaggtttaccttcactactaaaccctattactatctcattgtgacattgggtttgaaattacagagcttccctaagtaagagtgtgtgggagatacatactgttcaattctctctgaacaattgtttccccagtaattttgttccttttgacctggtgggttcaatagcaactcaaacattaaaatcagagggttacataaattcctgctggtagttttggaagagaattttttgagtctttagggtctagctaggaccagtgagttggccatttaagcctctcaagattcttatgaatgtctcagtattgctcccagaggcactaagatgaattaagaaagtgtgtcattttaaatttactgctaagaccctacattattaactttctttaatctatttctttttttttgagatggagtcatgcagtggtgctatctcagctcactgcaactgccacctcctggattcaagcaattatcctgcctcagcctcccaattatctaggattacaggcacctgccaccacacccagcccccccccccccccctttttttttttttttttttttttttttttgagaccaagtctccctcttgctgaggctggagtgcagtggcgcgatcttggctctacagcctccacctcccgggctcaagcaattcacctgtctcagcctcctgaatagctgggaatacagacgtgcaccaccacacccagctgattttgtatttttagtagaaacagagtttcaccatgttggccaggctggtcttgaactcctgagctcaagtgatctgcctgccttggcctcctgaagtgctgggattacaggtgggagccaccaagcctggccaatttttgtgtttatttatttatttattttgaaacggaggtttgctcttgttgtgcaggctggaatgcaatggcgtgatctccgctcactgcaacctctgcctcccgtgttctcctgcctcagcctcccaagtagcagggattacaggtgcccggcatcacaccgaactaattttttcttgaactcctgacctcaggtgatctgcccacctcagccctcccaaagtgctggaattataggcatgagccactgcgcccagcctcctttaatctatttcttatttcaaattaaggtaatcttatttttctcctaaacctatcacacagggttgtaggaaggaccctaaacaccagtatatgatgccagcaatataaatatttgcttctaaaatctattgtcaaattcttaaaagataacacaggccgggcatagtggctcacacctataatcccagcattttggtggctgaggtgggtggatcacttgaggctaggaatttgagactgccctggccaacaggggaaaaccctttctctacaaaaaacacaaaaatcagccaggcgaggtggtgtacacctgtaattccagctacttgggtgactgaggcaggagaatcccttgaacccgggaggcagaggttgcagtgaactaagattgtgctactgcactccagcctgggcaagagtgtgactctgtctcaaaaaaagaaaaaagatgataaatctttgttgttccataacattagttagtagaagttaatatcttaaatcgtacacaaaagtatctctcctccatttatgttcttttttttttttgagacggagtctcgctctgtcaccgaggctggagtgcagtgacgcgatctcagctcactgcaggctctgcccgccggggttcacgccattctcctgcctcagcctcccgagtagctgggactacaggcgcccgccaccttgcccagctaattttttgtatttttagtagagacggggtttcaccgtgttagccaggatggtctcgatctcctgacctcgtgatccgcccatctcagcctcccaaagtgctgggattacaggcgtgagccaccgcgcccggcatatattctttgtactatttcagtttgactgggtcccagatctgtacaggtctagtctgggagtcttccactagaattcatattcctttagcactgccaaagttatagtatgtctgctcctgagcccaatatatttcattcctcaaagttcaaggggtatcaagataaaaataccatagtagtatagcccaaaagttagttcagtcaaataaatgcctgagtttattatgacatttgtagtaatttataaactaaaccaagatatgagcattatctgttcaaaagaagttggtgtttcacggtcttttatattttagacctacagttgtcttaagtcacttgcagaaacttgttggtggaaggaggtgatagaaaaacatgagctattaaatggtggttagttcttttttttttttttttttgagacggagtctcgctctgtcacccaggctggagtgcagtggcgccatctcagctcactgcaagttccgcctcccgggttcacgccattctgcctcagccttctgagtagctgggtcaggtgcgtgccaccacgcctggctaattttttgtatttttagtagagacggggtttcaccatgttagccaggatggtctcgatctcctgacctcgtgatccacccgccttggcctcccaaagtgctgggattacaggtgtgagccaccgcgcccagcctttttttttttttttttgagacagagtctcacattgtcgcccaggctggagtgtagtggtgcgatcttggctcactgcaacctctgtcccccaggttcaagagattctcctgccgcagcctccctagtagctgggattatatgcatgccctaccacgtccaactaatttttgtatttttagtagagacagggtttcaccatgttggccaggctggtgtcaaactcctgacctcaagtgatccttccaccttggcctctcaaagtgttgcaattacaggctgagccactgcgcccagccttctttttctaagagacagggtcttgctctgttgcccaggctggagcacaagtggctgctcactgcagcctctaactcctggcctcaaaccatcctcccatcttagcctcctgaatagctaggactacaggtgcatgccaccatgcctggctaatttttaaatttttgtagaggcaggatcttgctatgttgcccaggctggtctcaaactcctggcctcaagtgatcctttcagattggcttcccaaagttccgggattacaggtgtgagccaccacgcctggcctttattttctttacagaaggtctgatataatgccttacatcctttccagctcttgtttctggtactccagttttgaatttttcatggattttgaccaggcactatggctgattagaataaatctcttgcctttgtgtagtggtatatgctagcaggattctagggattcttatgctgtcctaccaattttggaattatcttttttttgttgctgtttttttgagatggaatgtggctttgtcgctcaggctggagtgcagtagcgcgatctcggcttactgcaacctcctcttcctgggttcaggcagttctcatgcctcagcctcctgagtagctgggattacaggcatctgccaccacgcccagctactttttgcatttttagtagagacagggttttaccatgttggtcaggctggtcttgaactcctgacctcaagtgatccgccttccgtggccttccaaagtgctgggattacaggcgtgtggcaccgtgcctgtccccaatgttggaattctctggtaacaactcttgagtgctgagtgcatctccatggactaaaatgcatcatgaaaagatttttaaatctgagttgcttccaagtgtttaccagggccaaacgaagcaaaatgtcacttctctcttgcccttattcctcttctattcctggtcttctgttagtagctggagaaaaatcccctcaaaggatacctgaattagaacttttattagggttattttcaagcatatatttttattttttgagacaaagtcttgctctgtcacccaggcaggaatatagtggcatgatcttggctcactgcaacctccgcctcccaggttcaagcaattctcgagcctcagcttccccagtagctgagattacaggcatctgccaccacacctggctaatttttgttttttgttttccagtagagacagggtttcacctattggccaggctggtctcaaactcctgacctcaggtggtccatccgcctcgacctcccaaattgctgggattacaggtgtgagccaccatgcctggctttatttttattttttgagacaaggtctcgctttgtcaccgaggctggagtgtagtggcacaatgataggtcactgatggattgaacttgtggactaaagggatcctcctgcctcagcctcctgagtagctgggactacaggcatgtactgtcacacctcactaattttttgaatttttgtagagtcagggtctcatcatcttgcccaggccagttttgaactcctatcctcaagtgatcctcccacctcgacatcctgaagtgctgagattacaggaatgagcccgcatgcccagcctcaattttttttttttttttttttggagactgagtctcgccctgttgccaggctggagtgcagtggcgcgatctcggctcactgcaacctctaactccttggttcaagcagttctcctgccttggcctcccgagtagctgggattataggcacgcggtgccactcccagctaatttttgtatttttagtagagaaggggtttcaccatgttggccaggatggtcttgatctcctgaccttgtgatccacctgcctcagcctcccaaagtgctgggattacaggtgtgagccaccgagcccggctcatttttatttttagtaggttgataagtcagtgtgccttttttgactatttatttatttatttatttttgagacagagtcttgctttgttgcccaggcaagagtgcagtggtgccatctcggctcactgcaacctccgcctcctgggttcaagctattctcctgcctcagcctcctgagtagttgggattacaggcacacaccaccacgcccggttaacttttgtatttttggtagagacggggtttcaccatattggtcaggctggtttcgaactcctgacctcgtgttctgcccacctcggcctcccaaagcgctgggattgcaggcgtgagcctctgcgcccagccaactttgtttttgatgcaacctaagcttttgaattagtaaccttccttttctaaacctccccctttttaagcatttatttttacaataagaaggcctgcatctatattcttgggggcgcgtttcatttatgtagtgtgcaatgtcctaggcactatactaagccctcgggtatataagggtgaacaaaatggatgaaggccctgcctttatggagcttagtgttaggggagaaagacataatcatttaataaatatgaaataagtgctgggaaagaaaagcataagaaaactgtgagtgtataaaacaggagaaccagctttcatttgaggtgttagatttgggaataatgacgatcagggaaggcatctctgaagaaataagctgagatttgaaagaagtgtacagaagtaaaatggggtgggaggatgaacaaataggtggttctagttaaagggaatattacatataaagcatttgatgccagagtagctgtgtagaaagagcaagtctccttgagagtggtatgagaagaagctggagcagatggccagggccagacagtgcattgtcttcaaggtaatttaaggatgttggtcttaagaaagtcgtttgttcgttctttttgttgttgttgttctctaagaggtggggtcttgttctgtcacccacacgggagtgcagtgataggttcatagcttactgcatcctcgaacttccaggctctgttgtcttactttattttttattttactttttagagatgaggatttgccctgtcgctgaggtggcagtacagtggtgtgatcatggctcaactacagccatgaactcctgggctcaagtaaccctcctgccttagcctcctgagtagctgggactacaggcacatgctaccatgtcccacttattttattttattaaaaaaaggtttttttaggagacagggtctcacttcatcagccaggctggattgcaattgtgcgatcatgactcactttacccttgacctcctggcctcaaatgatcctcctgcctcagcctaccgaatagcctaggaccacaggcgcaagataccatgcctggatgattttgtaaaattttgtagccggggcacggtgactcatgcctgtagtcccagcacttttggaggccgaggcgggcggatcacgaggtcaggagattgagaacagcctgaccaacatggtaaaaaccccatctctactaaaaatataaaaattagctgggcagagtgtcgtgcacctgtaatcccagctattcaggaggctgaggcaggagaatcgcttaaacctgggagatggaggttgcagggaggagagatcgcgccattgcactccagcatgggcgacagagtgagactacatctcaaaaaaacttacagtagagatccattgtcttgtcatgttgcccaagatggtctcaaacttctggcctctaacagtcctcctgtctcagcctctcaaagcattgagattacaagtgtgaaccattacacccagcctgttgtttttaaagttgtatattattattattattattttttgtttttgagatggagtctcgctctgtcgcccaggctggagtgcagtggtgcgatctcggcccactgcaagctctgccttcccgggttcacgccattcttctgcctcagcctcctgagtagctaggactataggcgcctgccaccacgcccggctaattttttgtattttttagtagagatggggtttcaccgtgttagccaggatgttctcaatctcctgaccccgtgatctgtccgcctcggcctcccaaagtgctgggattacaggcgtgagccaccacgcccagccagtattactatttttttgagagggagtctcactctgtcgccagcagtctcgactcactgcaacctccgcctcctgggttcaagcaattttcttgcctcagcctctggagtagctgggactacaggcgtgtgccaccatgcctggctaatgttttgtgttttagtagagatggggtttcaccgtgttggccaggatggtcttgatctgacctcgtgatcggcccacctcaacctcccaaactgctgggattacaggcataagccgccgcacccagtcagtttttaaatatatatagttattgtttctgcattgttctgtttcttctaacattagaccagtagtacatatgatggttaggattgtaatctgagttccaggagcaggatgctgctcttcggtcacttcagaacctcgagatatcaccgaaaaccctccctacccacctctgctattattgcacttctcgcctagtattgtggtatgtaaaaaagtcattaaattcttaaattatttattttattttctctctatatatacgtgtgtgtgtgtatatatatgtatatatgtatatatatatattttttggttttttgagacagtctcattctatggctcagcaatgtcgccatctaggatcactgcaacctctgcctcccaggttcaggggattctcatgcctcagcctcccaggtagctgggattataggcatgtgccaccacgcccagctaatgtttgtatttttagtagagactagttttcactgtgttagccaatctggtcttgaattcctgacctcaagtgatccacccacctcggcctcccaaagtgctggattacaggcctgtgccagcgtgcctggccttattttattactattattatttttgagatagagtcttgctccattgcccgggctggagtgcagtggcacgatcactggctcactgcagtctcaacctcctgggatgaagagatcctctctcctcagcctcttgattagctgggactacctggctacattttttgttttttttttttctcttccagatggagtcttgctttgttgcccaggctgtagtgcagtggtgtgatctctgctcactacaacctccacctcctgagttcatgtaattctcctgtctcagcttcctgagtagctgggattacagacatgcaccaccatacccggataatttttgtattctttttttttttggtacggagtttctttcttcttgcccaggctggagtacagtggcgtgatcttggctcactgcaacttccacctcccaggctcaagcgattcttctgcctcagcctcccgagtagccgggattacaggtgcctgccaccacgcctagctaatttttttgcatttttagagacagggtttcaacaggtagagcagactggtctcgaattcctgacttcaggtgatctgctcgcctcagcctcccaaagtgctgggattgtagccgtaagccactgcccccagccagtttttgtatttttagcagagatggagtttcaccatgttggccaggctggcctcgaattcttgacctcaagttatccaccagcctcagcctcccaaagtgctggattacaggtgtgagccactgcacctggccctggattacaggtgtgagccactgcacctggccctggctcaccttttgtcctttttttttttttttttttttttttgagacagagtcttgctctgtcgcccaggctggagttcagtggcgcaatctccgctcactgcaagttctgcctcccgggttcatgccattctcctgcctcagcctcccgagtagctgggactacaggcgcctgccatcacgcccggctaatttttttgtatttttagtagagatggggtttcaccgtgttagccaggatgtctcaatctcctgacctcatgatccgcccacctcagcctcccaaagtgccgggattgcaggcgtgagccaccgcgcccagccccttttgtactttttgtagagatgaggtttcaccgttttgcccagtgtgacctcgaactactgagttcaagtgatctgcccactttgtcctcctaaagtgttaggattacaggcgtgagccactgcatccgacctattaaattatttttaagagaactattgtattaatgatttttccctacttttctattttgtacatttagctgcagtttaaaatctttaggctggcccaggcatggtgactcacgcctgtatcccagcactttgggaggtcaaggcaggtggttcacttgaggtgaagagttcaagagcagcttgaccaacatggtaaaaaccccatctctactaaaaatccaaaaaattaggccaggtgcggtggctcacgcctgtaatcccagcactttgggaggtcaaggcaggcggatcatgaggtcaagagattgagactatcctggccaacatggtgaaaccccatctctagtaaaaatacaaaaattagctgggcgtggtggcatgtgcctgtatttctagctactcgggaggctgaggcaggagaattgcttaaacctgggaggcagaggttgcagtgagccgagattacaccgctgcactccatcctggctacagagtgaaactctgtctcaaaaataaataaataaataaaacattagctgggcatggtggcgtgcacctgtaatttcatctactcgggaggctgaggcaggagaattgcttgaacccaggaggtggaggttgcagtgagcagatatcgcaccactgcactccagcctgggtgacagagggagactccgtctcaaaataaataaataaataaaatctgtagactacctcttaggttggttatgtgtctttcccaccattaataagatctgatgttttccctttcttttttttaatacactttgccttgactataagctttgaagttgttttcaaattgtcatcttttcagtcttgagtttttgttcttttttcagaacctggctatacatttctttttgcatacttactcttgaaggtgcctcatcagttgccacttaagcatatctgattcttaaaaatttgaatattcaagaacaaattgtaaaaatattccttgtataatttttggttttgtagtaattcctttgtttgcttcacagtacttctgcagagtgatccatttgtaattaatagacacacacacatcatccaccattgagctttatcttctcattagaaagtgcgtctaacccctatattttgagatcctggatttcagaatattggacttgatgtagacacgagtttctcagctttacatatcataggatgaaatgtatataacaaaagttgaatagctaacatctaactatagaaaccaagtagattatcagacttgtcctgttttgaggtaatactgccatgcccttaaaatgaagccttattcctgctgctagcagattcatgtatataaattagaggcactaatcttggtctcctcttgtcataaaaattacttcctctgtgggatctggctgttcttaaaatgggaggctcttccttgaattagatttcaaagtgttagtctcttatgaattagcttagcatcattttctgtagactgtatcagaactgtcagatgtttgtgcttggaatgctgaaatttgcatctcaaaatttcaaattctttacctgatttcttgttatcatgtgtcttacttcctgagaagatgcagggagcacatgacatagatgaactaagtttcttatatcttattctggtcatgtaaactagatttttttgtggcctaaaaccaaatagtcctgaccaaccttacgtgtttcttttcctcccgttcatctggtccagcctaaccaattaagatgtggacaaagtagctgcaagagagggcagagggaagggagagaaaactttgcccttttccttggaacaaaccacctatggaagggatcattggtacactttattctagtacatatcagagtgtttactttttttttttgagacggggtctcgctctgttgcccaggttggagtgcagtgatgcaatctcggctcactgcaacctccgcctcccaggtttaagcgattctcctgcctcagcctcctgagtagctgggattacaggtgcctgccaccacggccagctaatttatgtgtttttagtagagatgaggtttcaccacgttggtcaggctggtctcgaactcctgaccttgtgatctgcccgcctcggcctcccaaagtgctgggattacaggcgtgagccactgcgcccagccagagtgtttacttttaggtgaggaaggggaaatcatgcatagcaagtcacattcccaatgtcacctttatttattatttatttatttatttttgagacttgctctgtcacctaggctggagtgcagtggtgtgatcttggctcactgcaacgtccgcctcccaggttcaagctgttcttctgcttcagcctcccgagtaactgggattacacgcgggtgtcaccacgcctggctaattttttgtatttttagtagagacaaggtttcaccatgttggccaggctggtctccaactcctgacctcaagtgattccccctgcctccttcccaaagtgctggggttataggtgtgagtcaccgtgcctggccccaatgttgtcttttaaaattggttaattgaaatttagaattctttctcaaagtccgggcatggtggctcacacctgtaatcctagcacgttgggaggctgaggcaggtggattgcctgagctcaggagtttgagaccagcctgggcaatatgacgaaacctctctccactaaaaaatacaaaaaataaactgggcatggcagcatgtgcctgactcccagctattcaggaggctgaggcaggagaatggcttgaaccctgggaggcagaagttacagtgagccgagatcacgccattgaactccagcctgggtgacagagcgagactccgtctcaaaaaaaaaaaaaattctttctcacaaagaaacactagtatgataatggctggttggctgggcatagtactcacacctgtaatctcagcactgggaggccgaggtgggtggatcacctgaggtcaggagttctagaccagcctggccaacgtggtgaaacctcatctctactaaaaacaggaaaattaacctggcatggtggcggacacctgtaatcccagctactcagagactgaggcaggagaatcacttgaacccaggtgggaggttgtggtgagctgagatcgcaccactgcactccagcctgggctacagtaagactccgtctcaaaaacaaaacaaaacaaaaaaagctggttatacaggctatcctatgtaaggtataatgtaccatttaaaactgtctcaaatcacctgtggtgaaagatcattttgtttatttgttaattttcagtgtgttgttagtagtagtctcaatttcttgagttgtagaatggtaacatttttcttaatgacctcagtttgtagacaacattttaagtaacactgatttaaaatattctctggggtaaataaatgtaagatctttctggcatttcagagttggagcttaccctcacacttctcagaaaagtaatgtaaataatactaatagtactgcagtgtaatgggccatcattcctgacctttaaatttgtattactctaggaggacattatcttatgaaaaaaatttgttgggtcactttctgtaagacactgctaggtgctagggacactaataaaaagatgtatatggaaaaatagtgactaaaaagtggtaaataagagtgcttgtaaagggataaagtggtcatttagctcttgattgattgggtttagggtctttgtagaagagggagagagtattttgctggatactttattattttctgcaagcctgaccaggcacagtggctcatgcctataatcgcagcacttggggaggctgaggtgggatgatcacttgcacccaggagttcattaccagcctgggcaacatagcgagaccctgtctctaaaagaaaaaaaaaataattgaattaaaaccttaaacaggccaggcgcagtggctcacacctgtaatcccagcactttgggaggctgaggcaggtggatctcttgatctcaggagtttgagaccagcctgggtaacatggcaaaatcctgactccacaaacatgtaaaaattagccaggcatgatggtgcatgcctatagtctcagctactcttggaggctgaggtgggagaatcgtttgagcctggaaattggaggttgcagtgagcctagattgtgccactgtataccagtctgggtgacacaacgagaccctgtctgaaagcaaaaaacaaaatcttaagcctcacactctctgtgagagaaaatatcctcattttatagataacagaccgcagcgagtaagtggcaccagaattcaaacttggattttctgactctataaattcaattctatttcatatgtaaggctttcgtagaacaggaaatgagaaccatttcagcagttagacaaaagatttggtaggtggggtctcagtagatgtggagaaaggaatgatagataaaaagtagattcttatgaaagttaatctggtcttagtatgtagttttaattgaagcaacaaagagtaggatagatttgttgtgactggtggattatcttctaatgtgagaattgtagaatattcctctttcacttatgttttgggttttagctaattctgctatgtaaggtagtatttatggaacttcttctagaataatgctgtctttttagtaaaatagcacgtagaaatctgattcatgtaaaaatgtttataatatatgaattgcttatacagaataggtttttaagactcctgttgtatacgattatttattattattattttttgagacagtcttgctctgtcgcccaggctggagtgcagtggcacaatcttggctcactgcagcctccacctcctgggttcaagtgattctcctgcctcagcctcctgagtagctgggactacaggcgcatgccacaacgcctggctaattttgtatttttagtagagattgggtttcaccgtgttagcaaggatggttcttgatctcctgacctcgtgatccacccgcctcatctcccatcccgcctcatctcccaaagtgctaggattacaggcatgagccaccacgcccagctgatacttaagttgtggtggtggttcttaggtattttttttgttttgttttgttttttgagacagagtctcactctgtcgcccatgctggagtgcagtggtgcgatcttggtcactgccacctccgccctccgagttcaagtgattcctctgacctttgagttcaagcaattctcctgcctcagcctcccgagtagctgggattacaggcgcctgccaccacgcctggcatttttttttgtatttttagtagagacggggtttcaccatcttggccaggctggtcttgaactcctgatctcatgatccacccgccttggcctcccaaagtgctgggattacaggcgtgagccaccgtgcccggccattcttagtttttaactttatatttttgctttctcccatccaagtaccaaccaggcccaaccctgcttagcttttgagatttggcgcgttcggggtggtatggccataggcaccggccctctgctttctaactctgcttggacccttatagttctactcttccataataattttgtcctctactgatagcatacttttttgttgtttgttttttgtttttttgaggcggagtcttgctctgttgcccaggctggagtgcagtggtgcaatctcggctgactgcaacctctgcctcctgggctcaagtgattctcctgcctctgcctcccgagtagctgggactacaggcacacgacaccatgcctggctaatatttgtatttttagtagagattgggtttcaccgtgttagccaggatagtcttcatcttctgatctcttgatcctcctgtcttggcctcccaaaatgctgggattacagttgtgagccaccgcacccagcccctagcatactttctagaacatacttttctagaacatactttctgtactactgttctagaaatgcctgtcaaaatcccaactctgtaggtttttttttttgagactgagtctccccctgtcacccaggctggagtgcaatggcgcaatctcggctcactgtaacctctgcctcctaggttcaagcgattctcctgcctcggcctcctgagtagctgagactacagccatgtgccaccatacccagctaatttttgtatttttagtagagactgggtttcaccatattggccaggctggtctcgaactcctgacctggtgatcccctgcctcggcctcccaaagtgccaggattacagacgtgaagcactgcacccggcccacactgtagtttttttagcagacagtttcatggcctacttcactaagtagatggagatatccccccatcttccatggaaatgtctttcttacttgcctcttatttctctatcttagaaaaagaggaatccagtcgggctcggtggctcacacctataatcccagctacttgggaggctgaggcaggagaatcgcttgaactcgggaggcggaggttgtagtgagccaagattgcgccattgcactccaacctgggcgagaagagcgaaacttcatctcaaaaaaaagaaaaagaggagtcctggtcaaatttacagggcaacctcttcataatatgtccttatttccagtcattacttgttccttagtactctcttgccacaatgtctttctgtaactgttcccatctgactataaaaatgcctagattgtcaccatcatttaaaaaaaaaatatatatatatgccctttactagtccttagtgcccagcaactatttcattagtaaatgccttatgtaagggatcagtactgctttcctttccccaccatctgttctgtatagccctccataatctggtgtctgtacatgtcacactatggaaactatgctcaggagagttatgaatgtctcctgatcaacaactgtattgtgttttgcagtttaaaggtacttcaaaagcttattgatgcttctgtttattttatcccatgcttattgtttttttctattgttaatagatgtttgtgaaaatagaaggagcactagttctagttcatgcttgcttttgcttttccatagcttctaaaactaacagtgaaaatgatatattgaaacagtaaattatagatctataccagatttgtaattgtgtatttcattgctatttgaagtataaagtaatggttctgtatcatttattgggaaggttgaatttccatagcttcaaaatattcaaatttttttgcatggatttagctacgcttttcaaaatttccttttgatgaagtcattgactaaagcgtcattaaaacaaaacaaaaaaagaattccaaaaaccctccaaaattcctttttaaagataggaaggcatacctgctgtcattttataggtagaacactaaaacacagtaaattacctggcctccaacttggtagtctgatttttttctgccttggtctggtgtttttgtggttttgttcttactttttgtgagttgtgaggggttttttgttgtttattttttgttaggtgtatagacacacttttggatgtcatatttaacagggaaagcatagagtcatgggcctgaataacagttgagtacaaatatttataaattggttgaagtaactttgatttcaatgttatattttaaagtctaggttattttactacagagcattacaatgataaaatatttccttttttttttttttagcttgtcagctcatttgcagcttacgtttactggtttcttccacaaaaatggtatgtatttaaaagtaaataaagtggcattttaatagcaagatacctttgtgaatgtaaaaaaagtggggcttctgagtgtaaatttataaaattaagtttaatggaaaatatgttggttctgatgtttttgaactttaaggtatgaaggctaatgatgaaatttgtttttggtggatgggggtgcagagtgaaggctggagtgcaatgttatgatcttggctgactgcagcctccacctcccgggttcaagcgattctcctgcctcagcctcctgagtagctgggattacaggcacgtgccccatgcctggctaattttttgtatttttagtagagacagggtctcaccatgctggccaggctggtcttgaactcctgacctcgtgatccacccgccttggcctcccaagggggcgtgagccaccacgcctggctaatgatgaagattttaacaaattgtcttagaacttcaataggtaaagaatctcctcagtagaaccttttatgcataaacattttgaattaatgatactgtatcatgttttaaaaaaacacagtaaaacaactgaaataaccactattaccaatggcatatattaatattttagatattattcaaaggaaattatatggtatattactccagtaaaagctcaaagcatgctggaaagaattagagttgttttaaaaatggaaaaatacggccaggcgcagtggctcacgcctgtaatcccaacattttgggaggctgaggcgggtgtatcatgaggtcaggagttcaggatgttcaggagttcaggagttcagctggccaatatgatgaaaccccatctctactaaaaatataaacattagccaggcgtggtggtgggtgcctgtagtcccagttacttgggagacttaggcagaagaatcacttgaacctgagagtcggaggttgcaatgagctgagattgcgttactgcactccagcctgggcgacagagcgagactccatctcaaaaaaaaaaaaaaagggaaaatcacttatcagcttatccatcataagtctgtgtatatggcatatctttttattatgcaatggaataaaaccattattagaaacatgccaggttggttgtcttggtatcgtttagtaagaaacaaagattgaaaatgagtcctggtgggccgggcacggtggctcacgcctgtaatcccagcactttgggaggctgaggcgggtggatcacaaggtcaggagatcgagactatcctggctaacatggtgaaaccccgtctctactaaaatacaaaaaaactagctgggtgtcgtggtgcacacctgtagtgtcaccagtggcactccagcctggtgacagagcgagactctgtctaaaaaaaaagaaaaagaaaatgagtcctggcctggtggctcatgtctgtaatctcagcattttgggaggctgaggtgggaagatgacttgaggccaggacttcaagaccagcctgggcaacacagaccccatctctacaaaaattagccaggtatggtggtatgtcctgtagttctaggtacttggaagtccaagatggcaggatggcgtaagctcaggaattcaaggttacagtgagctatgattgcacaactctactccaggctgggcaacagagtgagaccttgtctccaaaaaatcccaaatattagactgggcgtggtggctcacagctataacgtcaacaccttgggaggctgagatggaagaatagcttgaggcttgcctgggcaacatagggagaacctgtctgtaagaagtaaaaaaagattaactgggcacagtggcacatgcctgtagtcccagctattctgtagtctcagctactcaggaggctgaggtgggaggattgcttgagtcttggaggttgaggctgcagtgagccaagatcacaccactgtactccagcctgagtgacagagtgagacactgtctaaaaaagacaaaaagacaaccttgccaattggccaattgtcaaaatgctctaatataaccattttttaatgactctttgggggttgtttgtttgtttagacagggtcttgctcgtgtcacccaggctggagtgcagtggtgtgatcaactcctgggctcaagtgatcctcctgcctcagcctcctgagtagctggaactacaggcgttcccaccatgcctggctaattaaaaaaaattttttttgttaagatggaatctcactacatttcccaggctggtctcaaactcctggtctcaagtgatcctctcacctcagtctcccaaagtgcggggattacaggtgtgagccactgagactggccctagttagggtttttatgtaagaaatttgaaatctcgtatttgtattagcagctaatgtaacttctagtttttaccttagatctggtctattttttatatagaagtaacctgggtagcattacggtttttgttttccttaaattatttgtaatggtctgcttagagtccttatttctagtcatcgtattttgttttctgtggtacttctgacgtgtctagactttaattcttcagaaacttataatttgaattttatacattcattagccctttgttctcagggacctgtgtagaacacatagtttatccatcactgaaatttttggaaagtagtcatattaagcttttttcctatcttcatgacaaaatatataaagttcaacaattgctcagatttactttgtttttatttttcttgatattgaagtaaaagagatagtgaactctgttgatatctctgtttccagaaaataattcctctgtcacctaggctggagtgtagtagtttgatctcagatcactgcagcctctgcctccaggttcaagtgattctcatgcctccacctcccaagtatctgggattacaggcgggtgccaccacacaagctaattttttttcttctttttctgagatggagtttcactctggttgcccaggctggagtgcaatggcgcaatctcggctcaccacaacctctacctcccgggttcaagcaattctgttgcctcagcctcccagagtagctggtattacaggcatgcaccaccatgccccgctaattttttgtatttttagtagagatggggtttctccacgttggtcaggttggtctcttgaactcccgatctcaggtgatttgcccacctcggcctcccaaagtgctgggatttcagtaggcatgagccaccgagcccagcccctaatttttatatttttaatggagacaggatttcatttcaccatgtttgccagtctggactcaaactcctggcctcaagtgattcacccacctcggcctcccaaagtgctaggattataggcgtgagccaccacgcctatgttgaaaataactattctattttaactttgaaactagtagaagttggaagtagatatattgtgtttcttttccatccaaggtttatttgtaccttttttgttttcaataatatttttaagaaaccaggatagaaaaccaacatcaagttctctaaaatgtaccaggagcagtgatgcttgcctgtatttccatctactgaggaggctgagctgggaggtttgcttgagcccaggagtttgaatagagtctgggcaacatagtgggaccctctctcaaaacaaggaaaaaaaaatttttaattcttaaaatgtgattttttcttcttattttcttactattaattattttttagacagagtcttgctctgtcactcatgctggagtgcagtgagcagtcttgcttcattgcagcctcccgggctcaagcgatcctctcacctcagcctcccaaagggctaggattacaggcatgagccactgcatccggcctcttgtttttaaatgaaaacttttgtttggcaattactacttgaaactgcttcttagaatgaatacacaaagattatttgggtactattttcatgatgagtattgttcggcaaatatttttgttactgcatttagacattggactattttttgctgtattaaggtgtttttatcctggatgcaacttccgaagaaactgatcaaatgtgttttacacacacacccccaataagaatgtttttaagtagaaaaaaagtgttgccggccaggcgcaatggctcacgcctgtaatcccagcactttgggaggccgaggcaggtagatcacctgaggtagggagtttgagaccagcctggccaacatggtgaagccccgtctctactgaaaataaccaaattagctgggaatggtgtttcatccccataatcccagctactctggagattgaatcatgagaattgcttgaacctgggaggtgcaggctgcagggagccgagattgtgccactgcattccagcctggacaaccgagtgaggctgactcaagaaaagaaaaaaaaaaattacccaggcttggtggcttgtgcctgtagtctgtagtcccagctactcgggaggctgaggcagggagaactgctttaacccaggaggcggaggttgcagtgagtcaagaacattccattgcactctagcctgggcaacagagcaagactctctctctcaaaaaaaaaaaataaagaaaaaatgtgttgcccagtgccttagaacaaaaaattttttttgtgtgttcatggattcatctattataatagttctggatgttattgaagctatttgatgaattagtgattaaatattcagttatgaactgttaatacctttgggactttaaaaacaagttatggaggactactctagaaccttaatttgtaaagcctgtgttaatttacatagagaatatagactatggtattcaaaattaacacccctaaattttttgtaagccaagatattctagatagtaaataatatcttgatttttgttatcccatttaaactgtagagaaattctggggaaagcatctaaaaatagctctgatagctctgtctctacgttttataatgtttaatgttttttgaaatccattttttatccttttggccacaagtcttggtcagatcaagaactttttagtttagttgtctctgtgcattcataatgaaacatgtataatggtaactgatttaattcaaatgttatcttaatactttttctagtagattttaggagaagaaaaaaattgaagatgcttattttgaatgtggttgtctcctgcaacttttttttttttttttttttttggagatggagtttcgctcttgttgcccaggctggagtgcaatggtgtgatctcagcttactgcaacctctgctccccaacccctggttcaagcagttctgcctcagcctcccaagtagctgagattacaggcatgcaccaccatgcctggctgatgttgtatttttagtagagacggggtttctccgtgttggtcaggctggtctcaaactcccggcctcaggtgatccacctgcctcggcctccctaagtgctgcgattataggcgtgagccaccacacctggccctcctgcaactgttttcatttatgctttctgccaagaagctttaactgtatttgtcaaaattacttttgactagcagtgtattatcataaatgttaaatcttcaagccggcccagttgcatgtgcctgtagtctcagctacttaggaggcttaaaatgggagaatcacttgagcccagaagtttgagaccagcctgggcaacatagccagacccttgtctgaaaaacaaacaaaaatattaaatcttcaaattagaaatattcagtaaatatggccgggtgtggtggctcacacctgtaatcccagcattttgggaggccaaggcaggtggatcacttgaggtcaggagttcaagaccagcctagccaacatggtgaaaccccatctctacttaaaattaaaaaaatcagctgggtgtcctggtgcgcacctgtagtcccagatacttgggaagctgaggtgggaggatcactttaacccgggaggcagaagttgcagtgaaccaagatcgccctactgcactccaacctggttgacagaacgagtctctgtctcgaaaaggaattaggaaatatatatatgtgtatatatatgtatgtatgtgtatatatatgtgtatatatatatatgtgtatgtatgtgtgtttgtgtgtgtatatatatatatatatatataaatagaaatgtgtagatgtgttttagagacaggatctcactccttcgcccagactagagggcagtgacaggatcatagctcactgcagccttgaactccttggctcaagagatccttccacctagcctctgaggtagctaggactacaggcacatgacacccaccacacccagctaattttttcacattttgtagagacgaggtttctgtgttgcgcaggctggtcttgaactcttggccttaagtgatattcttgccttggcctcccaaagtgttgggattacaggcatgagccactatgcctggccagtgaatattttttatacttacaacctgggcatggtggctcacgcctgtaatcccaggtactcaggaggctgccgtgctgatgtgtgaggatcacttgatcccaggagcttgtgattgcagtgagctgtgattgtgccactgcactgtaccttgggcaacagagcaaaacctatatctaatggaaaaaaaaattacagcatataggacggtaattatatttgttttgtgagtggtttatttacactatatataaaggcttttaaagagtttgctgtaagtttggaactgatttgaggaaaaaagaatgagtgaacttttgagaagtcttactgtgggaaatctctgtttgaagttccctgacttgttagcaaaatgaataccttgttcatatattttttaaatatattttaaaatactgattttctatttagataagccatcaccaaactcagaaaatgaacaaaattctgttaccctggaagtcctgcttgtgaaagtttgccacaaaaaaagaaaggtaatgtcaacaaaatgatattggtagattaaatggaataatttgcttaattggacatctttatgcatatatattgtattttaaagcttagttttaaattttgaaagcttaagaaatgtgttgatggcctaattataaaactgataacctcttttgccaactcgcatatctgtgtagtttttctagtcttttaataagtgtctgtacaaaactttctcataggagtctggaaatggagaagctatgttttagcatctggcataaattcagttgctgttctaccatttcaatctgttagcgtatttcttagctgtttgtacccattgacattttaggtaagggctaagagagagttttttccacaagattatcctttgtaacactgctctcaggcaaagaaattttgttgtcagcgttattagccattcacttattagtacattgcttcaaatttttataaggtgaagttatttcaccatagaaacaagtgttaagatgtttcctggtcaaccgatcaaagccaacatatgtacctttagttgcctcaagtcctcgagtgtttcaagaggagtaggagctggtctgggtccagggtcccagtgctgatattcttccaagaccataggccataagggcctcaatcactgggagggagtagactaaggcaccatggaggcagcagtggaactttatttttgaaagtttatgtaaaggccggttgccgtagctcacacctataatcccagcactttgggaggcagaagtgggcagattgcttgaacccaggagttaagcatcctgggcaacatggtgaaaccctgtctctaccaaaaatacaaaaatgagctaggcatgatggcctgtgcctgtagtcccagctactcgggaggattgcttgagcccagtaagtcgaggctgcagtgagccatgattgcaccactgagctccagcctgtgcgacagagtgaaactgtctcaagaaaaaaaaaaaatgtatgtaaagttaggaaatatcactccttgccaggtgctggtggctcacgcctgtaatcccagcactttgagaggccaaggtgggcagatcacgaggtcaggagatcgagtggctaacacggtgaaatctcgtctctgctaaaaatataaaaaattagccaggcgtggtgatgggcacctgtagtgccagctactcaggaggctgaggcaggagaatggtatgaacccgggaggcggagcttgcagcgagccgagatcgcacaactgcactccagcctttatcacttcttactcctacctaacctccatacacattacaacaagtgatgatatgaaaatccaagatacattacttagaataagatatgaatataaatatagtcattcttatgttcaaaaaaatgtatcggggtaatcattttcctggaagaatatacacagccaactgctagtattagtcatctccggagcgtaagacctgggggggtgggtgagaattcatagttttcactttatagtcttataaaatagaaatttttttagactgtatgtattctatttatttaaaagaagtagctgctgtaagatactgtcataaaagtcttctgatccttccagtttttctagtatgcattttcagtgtaactaatcatacaataacagaatattactcagaatatgatcattggtagataaaaccagttttgtttttgtttttttaaggatgatgattctttctgttaaacaacatattttaactatatggatttactgtttcataatgtagttgttgaccatgggattattagtcatttttttttatttctaatggtcctattagtcactgtcatgttaaaatagaacatttaagagatttgataaaagtacatgagtttaacattttagcatggtttttttgttgttgctaaaaagccttaccagagagatttagcatgcttttagttctaaatttctaatatacaactgtttcagatcactgttagctaaatattaggtatactgtatcataatttcattatgttggagaaaacctcaattgctttaatatttggaatataggtatttcaaatgtttatttttgcttcacagtttgcagaactatggttagaattttaacattccatttggtgatcatggcctatctcccgtgtttcctatagctgtgattagaagttttattataattcttattgcttatatacaaataaatataaattaataatgtttacctttgcaggatgtaagttgtccaataaggcaagttcccacaggtaaaaagcaggtgcctttgaatcctgacctcaatcaaacaaaacccggaaatttcccgtcccttgcagtttccagtaatgaatttgaacctagtaacagccatatggtgaagtcttactcgttgctatttagagtgactcgtccaggaagaagagagtttaatggaatgattaatggagaaaccaatgaaaatattggtaatttttttttttactagattttatcactggagactaagatggtcattgaaaatgattgtaccagtgttccttcatgatagtcatggtgctgagtcttaaagcaaacagtgaattcacctccacctcaacattttgttgtgcaaattttcaaacataaaggacaatgagaagtattttatagtgaacacctatctacttacctcttagattcaacaatgaacattttattatacttgttgtgtatttatccccctgcccatccctcttttcttccaacaattgtgaattcatctttgaggtattcattcaacaaacacataggtgctggggatgatttaatttaatcgaagatgattaaaacattcagtcctatcctccaaagtctcacaacctagtgtagggaaatagacatgaaatatatcattgcagcaaaatgatgagtgccataatacaggtatatgtgaagttcagcagagaaacacgttggaaaaaataatctttgactcgaagtattgtttgaagtttttgggagttaccacgagtgagaaggagtttgcctagcaaagataattctaaacagaaacattagcatttgcaaagatgtggggttaatgttgtgattgttaaaaagaacatatagtaaaaatgcaaaattggaaacatgtggtctgtatattattgcaactttagtgtaattcgtacctcatttgggataaatgtagcatgttttatgttaagggaccatatatcataacacatttttgttctaatatttgatttatgagaaatgtttgttaaatttagatgtcaatgaagagcttccagccagaagaaaacgaaatcgtgaggatggggaaaagacatttgttgcacaaatgacagtatttgataaaaacaggtaatgttgatgaacaagtgaggctcccacaatgttctggaaatgttttcattctgaagcagaatataattatttatattgattatttcattgcctttgtttctttttattcttacggatgaaaaaacaaatttgcaaacactgaatttttgtctgttttatagaaaacaataattaaggaactattcggatagatagctcagttaaacttacttatttggcgaatattttctgagtgtctactctttgccagacactgttctagacattaagaaggcaacaaaatccctgccttcaccatggagcttaacttttagtggaggaaacagaccaccacccaaaaaatcaactaatgtcacttagtgatgagtgttgtgaagaaaaatagagaataaatggttactgttttagagagatatcctctgggaggaggtagtatttgagaagagacttaaatggactgggccctacgtaaatcttggggttatgtgtttattaaaaattaaggaagaggagctggtcatggtggtatgtacctgtagttccagctacataggaggctaaggtgggaggattgtttgagcccaggagttcaaggcagcaatgagctatgatcatgccactgtactctggcctgagtgacaaagtgagatcccatcttttttttttttttttttttttagaatagtgtctcactctatcacccaggcaggagtgcagtggcgcaatctctgctcactgcaacccctctgccacctgggtttgagcaagtctcctgcttcagcctctggagtagctgggactacaggtgcgtgccaccacgcccagctaattttttgtattttcagtagagacgggtttcaccgtgttagccagaatggtgtcggtctcctcatctcgtgatccgcctgccttggcctcccaaagtgctgggattacaggcgtgagccaccatgcctaggcgagaccccatcttttttaaaaaaagaaagaaggccgggcgcagtggctcacgcctgtaatcccagctctttgggaggctgcagtgggtggatcacgaggtcaggagttcgagaccagcctggccaagatggcgaaaccctgtctctactaaaaatacaaaaattagccaggcacggtggcgtgtgcctgtaatcccagctactcaggaggccgaggcaggggaatcgcttgaacctgggaggcagaggttgcagtgagccgagatcacaccactgcactccatcctgggtgacagagcaagactcttgtcttaaaaagaaaagaaaagaaaatcatgtataatgattgtgtacctctgtgcatttggtacaggatggcaagaaacacagacttattaaatatttctgcaatttctgtttggaaacgaaatattttagtgaaaatatcaccagtgaaagaatgtctgggaagcaaatccagcattttttctttttgggattggagaaagaaacctatgccgtcatttcttgtaccaggctgcgtgctggtagttaacagtttattgtcaggtataggacaaagaaccagggaaagtaactaggccattcctcctattgtttattttttatttatttatttgtttatttttgagacggactctcgctgtgtcacccaggctggagttcagtggcatgatctcagctcactgcaacctctgcctcctgggttcaagcgattcacctgcctcagcctcctgaatagctgggattacaggcacctgctaccatgcccagctaatttttgtatttttagtagagatgaggtttcaccatgttggccaggctggtctggagctcctgacctcacatcatccacctgcctcagcctcccaaagtgctgggattacaggtgagccaccgtgcccggccagtgtctttttaaagtcagaaattttattgtggatcgaagatttaaatggaaaacaatagaaccataaatgtactagaaaatagtggtcatgtctgtgggggaaacaattagaatgaggcgcattggacttcatcgatgctgttaattgttctattttaggcagcatggggtatgttctattttcttttttaatcactgtacctgacacatatgtttacacatttcttgtaagaaaaagataatgcttttattttaaagaaaaagtgccaagaagaaactgggagaatttccccacagcagcttattttgaaaatattcacccgggcatggtggctcacgcctgtaatcccagcactttgggaggctgaggcgggcggatcacgaggtcaagagatcgagaccgtcctggccaacatggtgaaaccccatctctactaaaaatacaaaaattagctgggcctggtggtgcgtgcctgtagtcccagctactcgggaggctgaggcaggagaatcgcttgaacccaggaggcggaggttacagtgagttgagatcgcgccgctgcactccagcctggtgacagcgagactgtgtctccaaaaaaaaaaaaaaaaaaaaaagaattcaaaacgataggaaagttgaaagaatactaaagtcatttaatatccacatacccttcatctagattgtatctgttgttaacattttgccacatttgatttatttatgaggctatattttatttttgtgctgaataatttgaaagtttgctttattcctcatttataaactctcttgcatgtatctcctaagaacgaagacattttctgatataaccaccgtacccttatgaggaaaattaaaatacaaatacaatactatctccccagttgacctcaataatgtcctttataatttgtcctgtccccaccccgattccatagctagatgtcatagttcttcagtctccttcaatttggaatagtccccctagcctttctccctaccttctgtgacatttttcccccagtataggcctgtagttttgcagaatgtatctcaattaggacttctgtggtgatttcctcttgattagcttcaggttaaatatttttggcagggattctaatgagtgatgtgttctttacgtactacatcacagacaaaaggtaatattaggtttgatcactcagttaagatgctgttcacaatatttctccattgtaacagtacttttttcccttttatataaatcagcatataattcttatgctaatacatgaagctgagtaaatatccattttcttcccatagcctttcacccaatagttttagcattgattgattatttttgcttgaataaattattcctttggcagttggaaaatggtaattttctaacatttcttccacatttatttgcatttttatataaagaagagcattcgttctctgctcccactgcttcacttgactaaccctaaaaaatatatatatatgtatagagagagagagagagagagagagagaaacaggcaggcatggtgactgatacctgtaaccctaacactttgggagtccaaggcgggaagactatttgagcccaggagtttgagaccagtttgggcaacatagcaagacctcgttcctaaaaagaaaaaaaaaatttttttaaagttacatgtaaatttaaaaagaagagcattcctttccctagctttgatattttaaaatcagtatggattaacaaattctatttattcaattagttttaatctattgatactgttattttaatgctcaaattgtctcatattttgtcaggaggagcccttctaagtaggcttctgtgtcctgttttgttgctgctattttttcctgattttctagaatagtaagatataccagaatcaccttctcctttttttttttttttttttttttttttttttttttttgagacggagttttgctcctgttgcccaggctggagcgcaaaggcaccatctcagctcaccgctacctctgcctcccgggttcaagcgattctcctgcctcagcctcccgagtagctgggattaaggcatgcgccaccatgcctggctaattttgtatttctagtagagacaaggtttctccctgttggtcaggctggtcttgaactcccgacctcaggtgatcctcccacctcagcctcccaaactgttgggattacgggcatgagccactgcgccccggcctaccttcttcttttcttacctctgctctgaagttgtgatttcttcaaggagtcctgattccttatagaagaatagtatttttaagccaaaatctgcatgttagatgtgtaaaaattgtttttaaaatctcacagagggctgagtgcagtggctcacacttgtaatcttagtactttggaagaccaaggtgagaggatctcttgagcccaggagtctgaggctgtagtgagctatgattgtgtcactgcactctagcctgggtgacacagcgactgtcaaaaaaaaaaaccaaaaaatccagttaattccttgaaataataaccaatattcaaaagccttataggaaaagaatgcaaagttgaacaaaataaaaatcaaaaacttcttcagaaaacaaaaaagccaccataaccaaagtcaaaaatgacaagatggggagaaattattttcaacttgtctttcaggtagatgtctgtcattcttgaatgtaaacaggtcatactaattttaaaagaccactgcccaatagaagaatgggcaaaagaaacaataagaagtttaccaaaatagatacatatggttcttaaacaattaaaacgacaaaacatctgaattaaaagtacactgagatgcgttttttcacttatcagattgacagagaccaaaaaacttgataaagcacttgatcaggctgtgggggaaaagtctccacatacattacagataggagggtgcattggattgtaggtatcaaatgtacacccacaaaatggaatagtacgtatctatgtaaaagcataaggaagctcctttttgatttagaaatatatgaatttattacctctttgagtaaataaattagtttttaaaatagttgaatggctttgctgatgtactattgaagttgactaaatttaagtagtacagcatagagaaaagacaaaaattcttaagtgtcaatcatttggttttaagagactttagagacagacacctggattcatttgctggatctggctatttacggtttgattttaaggcaagttatttaaccttttcttgcctcagttttctcttctggcagtggagtaattgtacatagttcatagcattgttgggaagattaaatgaaccatgtaaaatctttataatagtgcctggcacatagtgaacactcaataaatgtcagctgtttttacctaatagaatttctctaagagtgatgaagagaagccagtttcttgatatatacagttaattactgagcatggttgaagaatggtgtttagagtagtagtggttactagtgtttaaagtatggaaaaaataagttatacatagacacatatgtacacacaccttaaaactatattgtgtgaatatatttgaattatttgattcaattagtattccatgaagtgtttattgagcacctatatgtgccaggtgcccccagaattccgtagttaccagattcgtcattataataatcagtttactggtcaagtataaaagtaaaggattctagttcaaacaattacagtagttaaaggtaacagaattcttagtgtttccctaagacaagcattgtttgtaacactattatcctatttttaaaaatataaagcctgggctgggcgcggtggttcacgcctgtaatcccagcactttaggaggccaagatgggtggatcacgagggcaggagtttaagaccagcctggccaagatgctgaaacccatctctactaaaaatacaaaaattagctgggcatagtggcacgcgcctgtaatcccagctactcgggaggctgaggcaggagaatcgcttgaacctgggcagcagagattgtggtgagcggagattgcaccactgccctccagcctgggttgcaacagagcaagactccatctcaaataaataaataaataaataaagcctgtacttacgctttatatttaatgttgacaacgtaccaggttttgagacctcaggcatattatactttacatgtttagagttatatctgagtagctacagtaatgaattcctagtaatacagtttttagtgtacatcattaaaattgctttcatcaggactggagtgtagctgtatttttaaaatcttgttgggtatgtaagctagtttataaatttaataaatggttttagtataaatctaaagatgtagaatttgtgtacttatagtaataacacaggttactttaaagtatatgtgtttgtctaacaggcgcttacagcttttagatggggaatatgaagtagccatgcaggaaatggaagaatgtccaataagcaagaaaagagcaacatgggagactattcttgatgggaaggtatggactacttagaaggttgagcacgttatagttatgaactcccatttttgactgatgttttcttccccaaatgctaattcatgttggaagtagagtcctttgttttttatactttaaaaaacacaagtaaatgatctagtcagagcatttaacggaaggtatcattctttttttttttttttttttgagggggagtcttgctctgttgcccaggctggagtgcagtggcatggtctcggctcactgcaacctccacctcccgggttcaagcgattctcctgtctcagcctcccaagtagctgtgattctgtgattctgcgtgccaccacgcctggctaatttttttttattttcagtagagacggggtttgaccatgttggccaggctagtctggaactcctgaccttgtgatctgcccaccttggcctcccaaagcgctgggattacaggcatgagccactgcacccggccacacggaaggcatcatactttgagagccagactgcctgattcaaatgtctgctcctagctatgtggcgtttggcaagttacttatccatgtctcagtttcttctcctgtaacatgagacatagaattgatggattagatgaaataataaaatatttagtacagtgcctggcatacaataagtgctcaataaatgttaacggctattttaaattctattcattgtaatggcaggtaataagggatgactagtaatacatttatcaagaaatctgcagaatttagattaagcgtacttaagataactcttttaagagataaagaggaatccatgcatttcttaaataggtagattcaaaactgtaacgatgtcttttatttctaaatatgttagatcagtgttaccatccaatgcaaaatctcataaggatttttttaagccttaaaattagttccaagtcaatctagaaggataagtatttagtaatactaagggaaattttagaaaaatattttgagaatttttacttaccagttttagtatgatatacgatatacagtagtacataccataaagttaagagaacttaaaccctatggtataagcataggaatagacaagcatatcattcaagcatatcattcaggcatagtcctgaaatagtttgatgtatatttgaaatttagttcatgataaaggtggtggtatagctatgtgagaaagagaaactgttcattaattgtgacaactcttctccagtcatctggaaataatcttagacctaatacattctgcaaggctcataaacatgtaaaaatgaacattcataagcatggaaaaaaaataggtgaatgttaatatactgcagtgaggaagacctttctaaggatgattgaaaagtaagaaagcataaagtaaaaattgtcgggttaaaattagtcatttttatactgcaaaatatctaaagttacaaacaaattatggaatgggggaagtatctgtaacacaaaatgctaatatgaatacataatattgtgaattataaaacaagaaaaagatacgcagtctaataagaaatatgtgtcaaggactctcacgcagttcttaaaaaaacaaatatagatggccagcagacttttaaagcagtactcaaccttattagtactcaaaggcatgcaaatgcagagatacttttgagagttcgacaaagattaaaagtttgacagtttctagtgttttagggacgtgaggacacatatactctcaaataatattttgatgtaacagtaagttggggccgggctcagtggctcatgcctgtaatcccagcactttgggaagccaaggcgggtggatcacctgaggttatgaatttgacaccagcctggccaacatgtcaaaccacatctctaccaaaaacacaaaaattagccaggcatggtggcaggtgcttgtagtcccagctacttgggtacttgggaggtttaggagtattacttgaacctgggaggcagaggtttcagtgagctgagattttgccacttcactttatccggggaaacagagcaagactctgtctcaaaaaaaaaaaaaaaaaaaaaaaggttgatacagtcttactatagggcagactggcaatatatataaagttaaaattgtatatatagtctttaacaattcaaattttatatttttgtcacagtgtagtaacttgttaacaaaagatgtaggtaacaggttttctcagcattttttaaataatgaaacattagaaacatgttaaatctaaaaagctattaaaaaggatgatagtttacaagatttccatattaaatttttacataactgtatacatatatatatatatattttccctgtttctaaaatttataatagtggttaactccaggtgatgagatttcaaataatttttatctatactgtttgggttttctgcatggatttatctttatgatctttttcattttaaatttcttgttttaaagtatgtttttattcatgagactataaggattatatatatgaagagtttttgttgttgttggttttgtttttgttttttttttgtttgttttgtttttgagatggagtttcactctgtcacccaggctggagtacagtggcatgatcttggctcactgcaacctccgcctcccgggttcaagcgattctccagcctcagcctcctgagtagctgcgatcacaggtgtgcaccaccatgcccagctgattttcatatttttagtagagatggagtttcaccatgttggccaggctggtctcgaactcctgaccttgtgatccacccgcctcggcctcccaaagtactgggattacaggcatgagcgaccgtgcccggcctggcctttttttgtttgtttctgttgagatggagtctcgctctgtcacccagaggtggagtgcaatggcgcggtctcagttcactgcaacctctgcctcctgggttcaagcaattctcttgcctcagcctcctgaatagttgagattactggcatgcgccaccaggcctgggggtttcaccatgttgtcttggctggtctcaaactcctgacctaaggttttccacccacttcggcatcccaaagtgctgggattacaggtgtgagctactgtgcccggcctatctggaagctcttaaccctgtaaaatgggcatccttttaagtcagagcatatagatttacttctttttaaaagttctgagattttttgttttgttttgttttgtttgggttccttaattgactaaaccagtgctggtctaatagataattgggttatttgattttttttaatcttgtcaaaaatgttaatagtgattatacttgaacctgtatcaagtattttataagataaattcctgtggactgctgtgtccaaactagtctctgaacacacttttactacattctagtctaagtagttttttgttttgttttgttttgttttttgagatggagtcttgctctgtctccaggctggagtgcaatggtgcaatttcggctcactgcaacctctgcctttcgagttcaagcgattctcctgcctcagcctcccaagtagctgggattacaggcgccagccaccatgcccagctaattttttgtattttagtagagacggggtttcaccatgttgtccaggatggtctcgaactcctgacctcacgatctgccctcctcggcctcccaaagtgctgggattacaggcgtgtgccattgcgcccggtcctctaatctaaatagttttaagaggattactttgtaataatgatatagaaggagtttaggcctctgtggcagtaaaataaattgaagctcattgaagactacttgatctctcctatatttgaataggaaagtaaaaatcagaagcaagtagaacaactgagatactctagtagtaaggcaatactgatctataacaaaggtttttttgtttttttgtttttttgtgatccttgaaggacaaggaagaaatgataaacattttaaaaaggacttggtaattgcatgagaaacgaaaggataggagtcaaatataattccaaaatttttagcttagggtcactagtagaatgataatgacaagaacaaaaataacgtgagaaggaaagtgttttagaagaaaagatactggatacacttctaaacatgttttagttcaaggtgacattgagatcaactggcagtgtccaagaggcaattggagatacgagtttacagttcaagtgtaaggataagaatgcagaaccaatttgggatcatcagcttaataggtaaattcttgaggatggttgagtgattcggtcagatggctaaaagttagctattttcaatagctcagtgttgtaaaatcaaagaagggaagcactggcagtcattgtcagtgaaactgagagaagtcaaagaaaattactaattgaaaagctgttcaatttacaaaaaaaaaagtaattggtcacctaagagcaaaggttgcatgctggtgggctttgggtaccacaattttatttttaagacatttcaaggccaggcgtggtggctcatgcctgtaaccccagcactttgggaggccgaggcaggcaaatcacctgaggtcaggagttcaagaccagcctggccaagatgatgaaaccccgtctctactaaaaacacacacacaaaaaattagctgggcgtgacggcaggtgcctgtaatcccagctacttgggaggctgagacaggagaattgcttgaacctgggagggggaggttgcagtgagctgagaccatgccagttgcacactagcctgggcgacaagagtgaaactccatctcaaaaaaaaaaaaagacatttgaactggttagcaacaacctaaatgggaaattttcccatgataactttgatttctgacctatttggaaaaatctgaaaatctgtctgtgttggacgagtgttttcacatggcaacaattcacctgttgctgatcagtggtcgcctcttttagacagcctgtgctctccagttcaagttctacagtgtctggtccatacttttactttgtttgcctagccgtctcagtcagcatttggattttcaagacaaatctattaaggcaaatccacattgacttataatgaattttttttaatttctacaatttatttgaattcattatctgagtctccagtctttgcatgttttttattttttagaggctgcctccattcgaaacattttctcagggacctacgttgcagttcactcttcgttggacaggagagaccaatgataaatctacggctcctattgccaaacctcttgccactagaaattcagagagtctccatcaggaaaacaagcctggttcagttaaacctactcaaactattggtaagaaaacattgcaatcaaaataataaaataatggtttgcagagttaggtcttgtgctttagattaattcatttgtgttttgctttatgtgattcttctttttttttttttgagatggagtcttgctctgttgcccaggcaggagtgcagtagcgtgatttcggctcactgcaacctctgccttgtgggttcagatgattctcctgactcagcctcccgagtagctgtgactacaggcgcatgccaccacacctggctaattttttgtagttttagtagagacagggttggccgagcgcagtggctcaacacctgtaatctcagcatttgggagaccgaggcgggcggatcacaaggtcaggagatggagatcatcctggctaacacggtgaaacaccgtccctactaaaaatacaaaaaaatttagccaggtgtggtggcgggcacctgtagtcccagctacttgggaggctgaggcatgagaatggcgtgaacccagaaggtggaggttgcagccgagattgcaccactgcactccagcctgggagacagagcaatactccatctcaaaaaaaataaataaaagtaagtcaataaattaaaaaagtagagacgaggtttcaccatgttagccaggatggtctccatcttctgacctcatgatctgcccgcctcagtctctcaaagtgctgggattacaggtgagagccacctctgctggcctctatgtgattagcctttcagaatattatctggcttattgggtaggttatgaatcatggtaaattaaggttctcctatattaagtgtaaagtcttgtgttgaagtagtagtaaaaattctttatccagaacctttgtgccaagtgtgcctagaaatttgaattgaaaaaaaaaattgaagcgtgatatggtacatagtatagatatcatatataacatcttgaagtggggtcctcatggtaagttagagcaagtttttccactaaacaaatttgccagaaacttacaagaaaactattggttttcagattagcttttaagattttggaatcacaactacaaagagctttggaactaagttgtttttttttgttttttttgtttttttgttttttgagacgaagtctcactctgttgcccagactggagtgcagtggcttaatctcggctcactgcacgctctgcctccctggttcatgccattctcctgcctcagcctcctgagtagctggcattacaggcgcctgccaccacgaccagctaatttttttttttttttttgtatttttagtagagacggggtttcaccttgttagccaggatggtctcgatctcctgaccttgtgatccgcccgccttggcctcccaaagtgctgggattacaggcacgagccactgtgcccagcccaggaactatgttttttataactcacatataagtttttctgtttgtttgttttgtttgttgttttcttttttgagatggagtctcgcccaggctggagtgcagtggtgcgatctcagctcactgcaagctccacctcctgggttcatgccaatttcctgcctcagcctcccgagtagctgggactacaggcgccggccaccatgcccggctaatttttttttttttttttttttttttggatttttagtagagatggggtttcaccgtgttagccaggatagtctcaatctcctgacctcatggtctgcctgcctcggcctcccaaagtgctgagattacaggcgtgacccaccaggcccagactaactttttttgtatttttagtagagatggggtttcaccgtgttagccaggatggtctggacctcctgacgtcgtgctctgctcacctgggcctcccaaagtgctgagaattacaggtgtgagccaccgcgcccaggctgcagtgcggtgacgtgatctcggctcagcacaacctccgcctcccggtttgaagcaattctcctgcctcagcctcccgagtagctgacattacaggcacacaaccactaggcctggctaatttttgtatttttagtagagacagggtttcatcatgttggccaggcttgtctcaaactactgatgtcaggagatccacccatctcggcctcccaaagtactgggattacaggcatgagccatcgcgcccagccagtttttaagaggaaaaaacatttacaaatagagttaactttctgctgagtttaaggcccaagttgcagtgttctatcatttttattttacttttttttttgagacagggtttctctctctcaccctggctggagtgcagtggtgccatctcagctcactgaaaccaccgcctcccaggctcaagcgatcctcccaccttagccctccatatagatgggactacaggctcgtgccaccacgccctgttaatttttgtatttttcggtagagatgggattttgccatcacccatgctggtctcaaactcctgagctcaagcaatctacctaccttagcatcccaaagtactgggactacaggcttgagccattgcgcctggccaagttctgtcatttttgtgtctgtccagtaggtacattgtccttgacctgagagagcactcatgtgtctttatctgcctgtttaaagaaggcagaaggcgtaagttgtcctccttgaccactcatgtacactcattgtgtgcaggtgacagtaatggtcagattaaagagatataagaaatggggccgggcgcagtggctgacatctgtaattccagcactttgggagaccagggtgggtggattgcttgaagcccaggagttcaagaccagcctgggcaacatagtgacaccctgtcgcttataaaaaataaaaaatataaataaaataagaaatggcttgtgtcaggggaaaggttttgcaagtaaactgtagtatgggcacttctcagaatactcagaaaccagtgaaataggtaaaaggttgcatcaaaactaagaaaaagttctatacaaattatacctaattgttaattatgtaaggaaatataaatacctttttttcttatatctgaaaggaaatataccagaatcatttgtcactatctttttagatttgaaataattattttttttggagacggagtcttgctccgtcacccaggctggagtgcagtggcgaaacctcagctcactgcaccctctgcctcccgggttcaagcaattctcctgcctcagcttcccaagtagctgggactacaggtgtgtgccaccatgcctggctagttttttttcatagagatggggtttcaccatgttaggcaggctggtctcaaacttctgacctcaggcagtctgcccacctcggcctcccaaagtgctgggattacagacatgagccaccgtgcccagcctgaaataattttaatataataagtataacttactttctgataaaccaacacttagtgcctgctcacacctgggatctgagaatacaaacaccaattaaaaccacactctgggctgggcacggtgactcatatctgtaatcctagcaattttggaggccgagatgagcagattgcctgaactcaggagttcaagaccagcctgggcaatatggtgaaaccctgtctctactaaaatacaaaaaatcagccgggtgtggtggcgggcgcctgtaatcccagctactcaggaggctgaggcacgagaattgcttgaacccaggaggtggaggttgcagtgagctgagattgtgccactgcacgccagcctagtcaccaaagtgaatctgtctcaacaacaacaaaaaaacacattctgacctcagagtgcttaaaacagcatggtaatgacatataattacttggagttacttttataattgtttaggacataggaggtggttttttgtttttgtttctgttttcctttttttgacagagtcttcctcagtcgcccaggctggagtgtagtggtgcgatctcagctcactgcaagctctgcctcccagattcacgccattctcctgcctcagcctcccgagtagctgggactacaggtgcccaccaccatgcccagctaatttttttgtatttttagtagagatggggtttcactgtgttagccaggatggtcttgatctcctgacctcgtgatccacccgcctcggcctcccaaagcactgggattacaggtgtgagccaccgcgcccggccctgtttttgttttttgagacggagttttgctcttgtcatccaggcggaagtgcagtggtgtggtcttggctcactgcaacctccgcctcccgggttcaagcaattctgcttccgcctcctgagtagctgggattgcaggtgcccgccaccacgccctgctaattttttatatttttaattagagatggggttttgccacgttgggcaggctggtctctaactcctgacatcgtaatcctcctgccttggcctcccaatgtgctgggattacaggcgtgagccaccgcgcccggccagaggtgctttttaaggaaaaaaataagtcctgccaatagaccttaacatcagattagggatgctgaattatgggtatttttcctgcgatcatcagttgagggagataacagaaatatatttaaataccacaagtagaattctgtgaaacctttaatatttaatagtttttgtgaggtatgttattttgcttttcaaaagcaatgtttttattgaatataaaagtgtatgttttcagctgttaaagaatcattgactacagatctacaaacaagaaaagaaaaggatactccaaatgaaaaccgacaaaaattaagaatattttatcaggtaaacatagctgacccttcttaaagtaattatgaaatgtatttgttttttgtatgtcaaacatgaaaattttttgttcatttttattttatttatttatttatttgagacaggatctcacttttttgcccaggctggagtgcagtggtgcagtcttggctcactgcaacctctgcctcctgggttcaacctgattctcacgcctcagcctcacgagtaactaattacaagcacatgccaccactcctggctaatttttgtagtttttgtggagacgaggttttaccatgttgcccaggcttgtcttgagctccaagcgatacatttgacagtgtctgccttggcctcccaaaatgctgggattaacaggcgtgagtgacctcgcgtcactgggcatatttaattaaagagaatatctctaatttgattttccgcttaaattttttaaactatttttagaagtgatatttaaacaaaatatcttgttatgcgtaaattggagatttgctttttttttttaattgtttttagtttctctataacaacaatacaaggcaacaaactgaagcaagagatgacctgcattgcccttggtgtactctgaactgccgcaaactttatagtttactcaagcatcttaaactctgccatagcagatttatcttcaactatgttgtgagtaatttttcatattttctcaatttgtgttaagaaatctcttgtaccccataaatatatacatctatgtacccacaaaaattttttaaattaaaaaagggaaaaaatatgcattaagtacaagatagcatgactttcaaaaattgtactttgtataaaaaacaaatttctgtatttgatagattgccgtatatatggattacagtgaatgattcagagttgacatatatttggaattataattaatgtttgtgtagtgtctctaattgactcacaaaatcctcaaccaactctttgaattaaatgataattttcttattcttgctcaaccaagaaataatttgtacaaagtcaccaagcaataaatgacatagttaagattttaacacattttgttgaccccaggtcttctgactgcctgtttaccatgctggtgtgcctggcctattttagttttctaaatattaagagcccacaaattctttaattaaattggagggatatttaggataggatacttaatatatttttttttttacatttttgttgcagtatcatccaaaaggtgctaggatagatgtttctatcaatgagtgttatgatggctcctatgcaggaaatcctcaggatattcatcgccaacctggatttgcttttagtcgcaacggaccagttaagagaacacctatcacacatattcttgtgtgcaggtaggtaaaaagggcatataagaaaagtttaagctctgatttttactgatgttggaggaacaaaggagccagatgaagctactagttcgttaggtggaaattattatttttcagtattaggtgtctatggggttgttaactactttataacacttgatagctcctatttctacagagaagttttctcacttttcctttgaactttatacttaagttttaatgatgttaatgtcactactgctgcagtggtttgggattaaagaattctgtcagaagtttctggataattggttgaacctgggaggtcgaggttgcagtgagccgaggttgtgccattgcactccggcctgggcaacaagagcaaaacttcgtctcaaataataataatagtaataaaaaaattacaaagagggaatttttaatcttagtaaaactgaaaaaatttttaaggcaggtgtatgcatatgtaaccagtgttaacggcttttctgctttgtgaatatacatgagttagaatacacagttttgacatgtaggattttatatgcatattcctatctgaatgtgccctaactagcacttcatttctttttcctcctttttaactgtaacttttcacacccagaaagacagtttgtgtttgaattaatatgtaataggtttgatttacattatgtaccaaaagaaaataactagtgggggtgtgcctctaatactattgttttatggttagttttataaaagggtgatgttgcagattatcacagatctcaactcctagtcgtgaggttagatggtatacatgtagaggccataaatcaacatttatttcttttcattaggccaaaacgaacaaaagcaagcatgtctgaatttcttgaatctgaagatggggaagtagaacagcaaagaacatatagtagtggccacaatcgtctgtatttccatagtgatacctgcttacctctccgtccacaagaaatggaagtagatagtgaagatgaaaaggatcctgaatggctaagagaaaaaaccattacagtaattattattatctttattggcaattatcttggaatattattttgttttgaaaattgcttactatgaactagacttttattgtaaaggaactttttttaaaaaaaaaaaaaggaatccggaaatgtacaggttttaaaattatgtcactttaaaagttaaccaagttaggctggtggcggtcgctcacacctgtaatcctagcactttgcgaggcaggcgcattgcctgagttcaggagttcaagaccagtctggacagcatggtgaaacccggtctctactaaaaatacaaaaaattagccaggcatggtggcatgcacttgtagtcccagctattcagttggctgaggcaggagagtcgcttaaccccaggagatggaggttgcagtgagccaagattgcaccactgcactccagcctgggtgacagagggagaccctgtatcaaaacaaacaaaaaagttaccaagttaaagggaatatggattttcttcaagtaaatttgtattgtgtgttttcatttctatatttataggtaatcgtaatttaggctttccctttttaaatgacggcaggtgtgctggctcacacctgtaatcccaacactttggtagggcgagttgggctgatcacctgaggtcaggagtttgagaccagcctggccaacatggcaaaaccccatctctactaaaagaaaatacaagagttagctgggcatggtagagcgtgcttgtgatcccagctactcgggaggctgagacaggagaattgcttgaacccgggaggtcaaggtttcagtgaactgagatcgtgccactgtacttcagcctgggcgatagagcaagactctgtctctaactaaataaataaattaaattaaatgactacttaaatagaagttaattttaagaaatgttgccactttgctgtataaatatgttgtatttttagttccaaaacattctgtttttgacattctcacaagtttttcttaaaatatgtgtttaataggtgtttttctttctttttcccagcaaattgaagagttttctgatgttaatgaaggagagaaagaagtgatgaaactctggaatctccatgtcatgaagcatgggtagggtatttctaaattaatttaaatattttattattctttatggtcttttgctgtttcacattctagaaatcttacgtgtgttagaatcttatttaaaattccattaatgtatatttgtcccaaattttattctattccaatgttttttggtttggcaggttttttttaggtacaaagacgttccttttggtattatttataacaatgaattaatattatattcattagtattaataaaatcaaggcaaaaaccgggccttgcctttagaacttgttgcacagatgtgagtcatcgcagcattatttatcagggttgttgattctgtcagctttcaagaggaaacaggctgctgcaaccctggtgtccgtaggaaagggtgtcatcatcatagaacctcctcagaaatcactggtgcccatcctaactctcgtagtagtgtttctcccatgcttgcaaactctatcagggttgactcgttcacactcaaaacattttatagagctgggtacagtggctcatgcctgtaatcccagtactttgggaggccaaggtgggtggatcacttgaggtcagaagttagagagcagcctggccaacatggtgaaaccctgtctccactaaacgtacaaaacttagccgggtgcagtgtcacacacctgtaatcccagttactcgggaggctgaggcactataatcacttgaagaacccgggaaatggaaattgcagtgagccaagattgcaccactgcactccagcctgggcaacagagtgagaccctatctccaaaaaaaaaaaaaaaaaaaaaggccaccttggtgggacccacgaccagggagcagcagaaggcaagacagagctgtaggttcatttaatgacccaattttcatgccttttagtgccacgtgtttcatgtctggaaatcctgaaaattaccacagttattaccacaatttttaaccattggttaatttttcagaataaaacgtggctttttggatttgtttaccatttcatagaggtgaaaggagaacaatttttgtttcttattcctttgtggctaaaagtatgttcccggcttggtgtggtggctcacacttacaatgctggcactttaggatgccaaggcaggaggatcacttgagttgaggaattcaagaccaacctgggcaacacagtgaaaccttgtctctactaaatttttttttttttttttttgagacggagtctctctctctcgtccaggctggagtgcagtggtgtgatctcgactcactgcaagctccacctcccaggttcacaccattctcctgcctcagcctccggagccgctgggaccacaggcacccgccaccacacccagctgattttttgcatttttagtagagacggggtttcacagtgttagccaggatggtcttgatctcctgatcttgcgatccacccacctcggcctcccaaagtgctagaattacaggcgtaattacctggcccaaatattttatgcttttaagactgcttatgtaattgaagaacagaaattatatctgctgttctaatggtacctgtttaagcttaagttagattaaatctcttgaaatttttaaaatggtaagctcattcagatgattgaatttcagtttctctatagttttactgcttctttaatcatcttttattttactggaattggatatagtcttattataatggttatcactgttgcatttgacaaaaatgctttgtattgctattcatattctgtttttattaaataggtttattgctgacaatcaaatgaatcatgcctgtatgctgtttgtagaaaattatggacagaaaataattaagaagaatttatgtcgaaacttcatgcttcatctagtcagcatgcatgactttaatcttattagcataatgtcaatagataaagctgttaccaagctccgtgaaatgcagcaaaaattagaaaagggggaatctgcttcccctgcaaacgaagaaataactgaagaacaaaatgggacagcaaatggatttagtgaaattaactcaaaagagaaagctttggaaacagatagtgtctcaggggtttcaaaacagagcaaaaaacaaaaactctgaaaagctctaaccccatgttatggacaaacactgaaattacattttagggaattcatcctctaagaattatgtttttgtttttaatcatatgttccaaacaggcactgttagatgaagtaaatgatttcaacaaggatatttgtatcagggttctacttcacttcattatgcagcattacatgtatatcacttttattgatgtcattaaaacattctgtactttaagcatgaaaagcaatatttcaaagtatttttaaactcaacaaatgtcatcaaatatgttgaattgatctagaaattatttcatatataaatcagaatttttttgcatttatgaacggctgtttttctactttgtaattgtgagacattttcttggggagggaaaattggaatggttcccttttttagaaattgaagtggtcttcatatgtcaactacagaaaaggaaaaaaatagaaattgaaggatttttatgaaattatattgcattactatttgcagtcaaactttgatccttgtttttgaaatcatttgtcaattcggaatgaaaaattataatgtaattttacattacataagttccttttacaattaaaaaatagcacttcttcatcttatgcctgtttgagaagatattaaattttcacattgttgacagtgaaatgctatgttggtttataagattacagaccatttgttttcatgtggataattttagtgcattgctcacccggtatgttttttttttttaacttgaacattttgcttgttttgtttttcttttttaattagataatcacacggaaaattaagctgttcatatctttaaattaggattgcaaaccaaggaaagaacgcatttgagattttaagatgtcacttataaggggagaagtgttcttaaaaagtcaaccagaaaactgttatgccttttatttgtttgcaaggatgtctttgtaatgtgtttcatgaatagaatatccaatagagataagctgacttgaatcattttgagcaattttgccctgtgttatatgtgtttcacgcacatatttgcagttggattttctccaacagaaagtggattcactactggcacattaacaagcaccaataggtttttattccaactccgagcactgtggttgagtaacatcacctcaattttttattatccttaaagatattgcattttcatattctttatttataaaggatcaatgctgctgtaaatacaggtatttttaattttaaaatttcattccaccaccatcagatgcagttccctattttgtttaatgaagggatatataagctttctaatggtgtcttcagaaatttataaaatgtaaatactgatttgactggtctttaagatgtgtttaactgtgaggctatttaacgaatagtgtggatgtgatttgtcatccagtattaagttcttagtcattgatttttgtgtttaaaaaaaaataggaaagagggaaactgcagctttcattacagattccttgattggtaagctctccaaatgatgagttctagtaaactctgatttttgcctctggatagtagatctcgagcgtttatctcgggctttaatttgctaaagctgtgcacatatgtaaaaaaaaaaaaaaaaagattattttaggggagatgtaggtgtagaattattgcttatgtcatttcttaagcagttatgctcttaatgcttaaaagaaggctagcattgtttgcacaaaaagttggtgattcccaccccaaatagtaataaaattacttctgttgagtaaactttttatgtcatcgtaaaagctgaaaaaatccctttgtttctatttataaaaaaagtgcttttctatatgtacccttgataacagattttgaagaaatcctgtaagatgataaagcatttgaatggtacagtagatgtaaaaaaaattcagtttaaaagaacatttgtttttacattaaatgtttatttgaaatcaaatgattttgtacataaagttcaataatataaaagctgtattctgttttggggtttttttgttattatgcattgttaacatgtacattaaaattttgatttagatagcatagtaagatttcagcctcaaatgagtcagagctaataagaaattaggaaaatcttaatgtgaaatcctgctttcagcagttacaactaatatgtcatttatggtattacataaatatttaaaaatttatagttcagagtaatgaaggagagagattcatttttcacagcatacctttttatactatttaaacttttaaggtatatatgtttttaaaacctaaaaaaaaatgaaaagcagagttgagtgacaaataaggtgacattgaattataacctaataaataaccagttataacccaatgagtataaaatatccacaaatctatactcagaaataaatgtctgaaaaaataaatgaataaacaaatctgtgcagaaaacttccaaataatttatgtagatattgccccttcaagaaggtagaacataactccccacccagtaagtgtggctgtttacagtgacttacagtattggaggtttgaggagatgggggaggatgtagggaaacctgacaaacactgcctcacccagaggaccaaggttaacatcatcagtgataagtcacgacgacggcatgcactcttgataagacgagaactgcacatcacctctgtggtcttcctccccaaaatgcaaaaacctaggctaaccataagaaaaacccataaggagggctttctacaacatacctaaccagtactcctccaaactgtcaaggccatcaaaaacaaggaaagtctgagaaaccgacagtctagaggaaaacatgatgactaaatatcatgtggtataggatcatgaggcagaaaaaggacgtcaggtaaaaactaaggaaatctgagtaaagtatggacttgagttaataacagtgtgtcaacactggcccattagttgtaacaaatatcccacactaatctaagacgttaataacggataaccaagtacaggatatacggaaaccctctactatctttgcaacttttatataaatctaaagctatcctaaaattttaaagttttattttttaaaagcaaaaagttcaaaaagaatatttcttaaaagctggaatgccaaaaaagtttaataagatacttgaattaaactaacattttggggaatattagtaatgacccaaggcagaaataaaacactaaaatatatagcatccctaatttatgtgggaatgaacaaggttctcttgggaaaatgaaatacggagaactaaagtaaaatatacacacagtcatgcactgcacaatgtttcagtccacaaggaaccacatacatgacggtgatcccataagattttatgtagtacctttttaaatgtttagatatggttagatacacaaatacctaccgttgtgctacagctgatcacgggattcagtacagtcacatgatgtgcaggtttgcagcctagcagcaataggctatgccgtataacctaggtgtgttggaaaccctaccatctaggtttgtgtaagtgtactctatgatgttcacacaatcgggacatcgccaaatgacacatttttcagaatgtatccccatcattaagcaatgcatgactgtacttgaaaattttaatctatttttggccggacacggtggctcaagcctgtaatcccagcactttgggaggccaaggcagttggatcacgaggtcaggagatcgagaccatcctggctaacacggtgaaacctcatctctactaaaaatacaaaaatttagccgggcatggtggcagtgggcgcctgtagtcccagcttctcaggaggctgaggcaggagaatggcgtgaacctgggaggcggaggttgcagtgagccaagattgtgccactgcgctccagcctgggcgacagagcgagactccatctcaaaaaaaaaaaaaaaattttttttaatctattttcaaattttgcagtgatttcataccaacagtttagctcagacttaacaaaaataaaatgagaaaatgaccctctcaccattagctgtcaccagaaaggatttgttactgccctgagccttatcggtcaggtcttcagttatgtccatgtgtcggatttcttcatgcatttcttccagaattttgcagagttctgcttcccaataatctttgtctagacagtcaattaattctgcaagctggacctttgtgctgtagtaccaaattttattttcattttcattttctgtatcttctctgtttaaaaatggggaaatactttatatgttagacataatgccacttttctgacagtttcatctacccagtgaaaagttaaagcttatgcactaaaactcaatatatgtgctcacaagagatccctgcaggtcttactcaaacttgatttactctgagaaaggacatctaaaaaacttgatacagagaaagatgacctcaaaattcagaaccatatgagagtactttgtggaagccagtttcagctacatctcaatcaactttaagatcatcaatgtaacaatatgatgagccgaatgtatttagaattattttattttaattatttattgagatggagttttgctcttgtcactcaggctggagtgcagtggcgcgatctcggctcactgcaacccctggcctcccgggttcaagcgattctcctgcctcagcctccagagtagctgggactacaggcatgtgccaccatgcccagctaatttttgtatttttagtagagatggatttggccaacatgttcttgatctcctgaccttgtgatctgcccacctcggcctcctaaagtgctgggattataggcatgagccactgcacccagcctagaattattttagaataaaataaatgtattttagagacagggtctcactttgtcacccaggctagagtgcagtggcaccatcatggctcactgcgtactcagactcctaggttcaagcaattctcctgcctcagcctcccaagtagctaggactacagacatgtgccaccatacctggctaattttataatatagtttagaaatatttccatcaaactggtgtaaacgctttgctaagttctggttcttgaaggagttatctcaaataatatctcatcccttttcttcgggacaatcgaagcccaaaatgaagagaagagcttcctctccagcctaaaactctcctaaggttccattcacttttaatggatttaaagacttcaacagagatggtcactaacttaaaagaaacaaggcaaattaatgtctaggactagatgtagaggaacacacataatggtatttctgttcccactcaaaagcaattcaagagtatgtgtgaggcaattgatgacagtgagtctgattttcctgtttcctcaatggcaaactgagggaactgaaaaaactgggcttttggagagatctggctttaaataggctaatgtgcttagaagatatgtggacatggacaaaacacaacctctctgagtctctaagacattttatttatctcacttgtaaaatgaggatataataaaacctgcctgtgtgccactataagacttaaaagtataatgatgaggcatctaccatagtgcctgggcacattagtgatcaataaatgttaaatattattgttaaggtagtaaatgaataaaaattcagcagcattacaggaatgagtcactcagtaattctgaagaaagaagggctatattaaatcatagataaaaggatactggtggagtacccttattctgaaaatctgaaatccaaaatgctccaaggtccaaaagtttttgagtgtcaacatgctgttcaaaggaaatgctcattagagcatttcagattttcagattagaaatgatcaactggtaagtagaatgcaaatattccaaaaatgcccaaaacacttctgatccaaagcattttaggtaaggatgctcaacctatacagtattcactgacttaacatttttcttcttgaagccacagaaagataaattcattaaagcataaaggagcaaaacagcaaatacctgctaatccattcaaagaagagttgggtttttttggtctattttgtttaacttttctcttttttttggtgggggggagggggtggtgaaggagtctcgctctgttgcccaggctggagtgcagtggcatggtctccgctcaccacaacctccgccttccaggttcaagcgattctcctgcctcagcctcctgagtagctaggactatgggcacatgccaccatgcccggctaatttttgtgttttaagtagagatggggtttcactatgttggccaggctaacctcgaacttctgggctcaagtgatccacccacctggcttcctaaagtgctgggattacaggtctgagccaccacacctggccaccctcttcaaacaaaatatgagcatttccattggcctaggtcttcaccttgtctactttattgacttacattacttacctagtccctgaagacataacacacatttgccacccttagagctcaaccaaactgtattgaatgcatgtatttggcaattagtgcttgtattttaattttcatttcacatatgtgttccattttcctaactagattgaaataagccatctcctattaggtatttttctttcttttttaaaaattttgagacagggtcttgctctgtcactcaggctggagtgcagaggtgcaatcatggctcagtgcaacatccacctcccaggctcaagcgatcctgccccctcaccctctggcgtagctgggaccacaggtgcgcaccaccatgcccggctaatttttcaatttttttctagagacgaggtcctgctatgttgcccaggctagtctcaaactcttgacctcaagcaatcgtccggctttggcttctcaaagggctgggattgcaggcatgagctatcgcgcccggccaagtatttttgtttaaattactttttggttgtcacttatctcaataaatattaacatatgtttacgaaacctttctttttctttttttttttttttttttttttttttttttgagacggagtctcgctctgtctcccaggctggagtgcagtggcgcgatctcggttcactgcaacctccgcctcccggattttacgccattctcctgcctcagcctcccgagtagctgggactacaggcgtgcaccacctacgcccggctaattttttttgtatttttagtagagatggggtttcactgtgctagccaggatggtctcgaactcctgaccttgtgatccgcccgcctcggcctcccaaagtgctgggattacaggcgtcagccactgtgcccggcaaacctttctcttatctgaagaactgacctcaaccactcagggttgagtccctgtgataaggtttgagggtgcctgaactgtcaccatgattcgtcccctgggctgagctcaaacctagtgatttgtcaggtaaataaattaaggttatttcccgataatacagacctgtaacaccgtgaagtaggttttaggcaggattccctcttttccactgcaaaggagaggtaagttcttgctaaggtggtcaggctcctagctgggacactgggaaggtggcgggagattggaacatgcagtagttgcattctggagtttactgaggctttccgagtggggatcccatgcaacaggtcttagggacccccctccctccaggcgtggcagcccggggtgtggctcctggcacagatccggagcagttgtcatcggagtcaattcaggactccacttccaagcttcggagtttcctaaattctgggggcttgtctccctgtaccccaccccgactaattttcctcggtcgctggcgctgccccgtcccttaggtcgctcgggccgcccccctccgcgactttttttttctttctctcgctgcctctttcagcctcagtttccctagagggcgggaggggaacgatatttgggggctctcctgccttcctctccgagccgcggaaggggagtcgcgggaaggagacccggcaggctttgggctccagccaggggtccgcggagactgtggtctccgaaggccttagacgcggggcttgtcaggagctgcgggcctctttcagccgcgccacccgcacccggagcgccgtgctgcgccaagtccaggcgccccgagctctccgcccccgactcaatgctcccgcgctccccctagcggccgccgcgccacctcgcccccttcccaggctgggcggcggcgcacctcacgtgaccgcgctcctgtagagggaagaaacaaggtggcggttgaaggcgatcttgagtggggccccagcaattcggttgagccttctccctccactcgcttccgccggccgggcccctcccgcccagcccctcgggcctcccaacccggccccggcgctccccaccgccgccactgcgcccggccctccccgtcagctttcccttctcccgccgcctgggctccaacaagaggggccggcggggcaggccgaccaagcagcccgcggctcccgctgcggagcgctgcgccccggccccgccgccgccgccgcccacgtccggacccatcgggggctcccctcgccgatacgcggtagtagccggggcaggtgggcagccgccaggctgaggtggcgcccaagacgcggctgagctcgcccagggtgggcagcagtagccggaggaagccaccgccgccggcccgccccgcgccggcaccagcgcacgggcccggcgggggcgcgggggcagccacctagcccggaccaccgcagcccggagggctgtcaacagagtggtgtatgatgactacgagagcgaggaggaggagtaagaggaggggggcggcgatgccgaggagacccaggagtctgaggacaactaggaggatgacatggaggaggacgacgatgactccgattatccggaggagctggaagatgacgacgaggacgccagttactccacggaaagcagcttcagcagcactccaggtacccacccagcgcagttgctgcagactcattccccacctcctctcccctccccccttgctcacttatgtgctgtgcatcccgctccgatctcccgccaaccccgccgacccctaaactttagaggggaaatgggagggcacatcaagtggcaaaaaactagatttataagaggaaagaagcacattgttcaaaatggagattgcattgttgcaggccgcactcgcttgctccccgtccccccaactccctttttttctcctcaaaatttgtgccagtgcagtgtctccaccgggcaggattgaaactttggcaaacacatatccattgcattcatttttctccccttgttttggtgtggttttctggaatgaaagaagcctcttgttttgcaaacctctttgcatttctaatgtgtttcctttcggattttcattatatatctgttccttaaaagggaattaaggatttgtacagattgtggcacacagacacacagaaaaacatgcctgtgttcacacccctagctgtggtttttaaattgtgttaaggaaacggatcattttggttagtaggggaactttacctggtcctgtgtgtttgtttttattcttcgagtgctgacgggctagtgcaaca[145 bp omitted]tgttttttgtatgaacgcagacttgtttctcttgagtaaatacctaggagtatgatttccgggttgtatatttataagaaactgccaaaactgttttccaaagtagctgtaccatttttcattcttacctgcaaatgtatgaagagttccggttgccctgtatcctccctagcacttgatattgtcagtttttgttggttttttttttagccaccttagtaagtatatggtggtagctccttgtggttttaatttgcttgtccctaatgactaatggttctgagcctctttttatgtgcatctttttatttgccatctgtatatcattgtttctggaaaaatactaaaatcttttttttttttgaggtagagtcttgctctgttgcccaggctggagagcagtggcacagtcaccactcactgcagcctccaccttctgggctcaagccatcctcccacctcccagtctcccaagtagctgggattgcaagtgtgcaccaccatacctggctagttttttgttggtttgtttgttttaaatagagatggggttttgatatgttgcccagactgattttgaatcctgggctcaagcgatctgctgcctcggcctcccaaagtgctgagatgacaggcatgagccgccatgcctggccaagataccaaaatctttatttaagatgtttaattgggttgctttctttattgttattcttcttttattttatttttttaagacagagtctcgctctttcacccacgctggagtgcagtggcatgatcttggctcactgcagtctgtcattcccctcgaccctgggctcaaggtgatcctcccacctcagcctcccaagtagttgggaccacaggtgcatgccaccaccatgtgtggctaatttttgtatttttaatagagatggggtttcgctgtgttgcccaggctggtcttgaactcctgagctcaggcaatctgcctgccttggcctcccaaagtgctgggattagagacatgagccaccatgcctggccaatttcttcttattgggtagtaagagttctttatatattttggatataagtgctttgttaggttctgtgatgctcatatattttctccccatctgtgccttgtgtttcattgtcttagcagtgtctttttcccagagcataagttttaaatttggatgaagtctgctttaccacattttttcttttacagatttgttgttcatctaacaactctgcctaacccagatcttgccagactttttctgtaaaaggtcagatagtaaatattcagccttgctgtccctgttgcagctctgccattgtagcaatgaaagcagtcgtagacaatatgtaatgtctatagaatgagaatagctgttccgataaaactttatgaacactgcagtttgaatttcacataatttacaaattatcaattatattgttattcttttgattattacaaaaacgggtagtggattggccatggtttgctgattcctggcctgaccaacccaagttcacaaagattttcctctttgattttgttgtggtcgttgttgttccacaccttcttttttcactgtttccttaaggtagagtgtacatatttataagggtacatgtaatattttgatagattcatacaatgtgtaatgatcaaatcaggttaattagggtatccatcatctcagatgtttatccttttttttgtattgggaagataacaaatgttctagctattttaaaatatacactaagttattgttgactctagttaccctactgtgcaaacaaaaactaaaacttattccttctatctgactgtgcttttatgcccatcaatcaacttgtcttcatccctacctgcttcccagcccccagtaaccatcattctactgcctatctccatgaaatcaacttcttaatctctcacatatgaatgagaatatgcgatacttgtctttctgtccttggcctatttcacttaacataatgtcctccagttctatccatgttgctgcaaataggttttattttccaaacctctagctttatagatgaaggatttcactttttttttttttttgagatggagtcttgctctgtcacctaggctggagtgcagtggcacaatctcggctcactgcaacctccacctcctgggttcaagcgattctcctgcctcagcctcccaagtagctgggactacaggcacccgccaccacgccccgctgatttttgtatttttagaagagacggggtttcactatgttagccagtcagttctcgaacccctgacctcgtgatccgcctgcctcagcctcccaaagtgctgggattacaggtgtgagccaccatgcccggcccggatttcacttttttaatggctgaataatatcctatcgtgcatatatacctcattttctttgatttttctttctttcttttcaaatagagatgaggtctcactatattgcccaggctggtcttgaactttagggctcaagcaatcttcctgccttggcctcccaaagtgctgggattccaggctaaaccattgtgctcctttatgcatttttctttttttaagacagaatctagctccgttgcccagaatggagtgcagtggcacgatcttggctcactgcagcctccacctcctgggttgaaatgattctcgtgcctcagcctcccgagtagctgggattacaggcacccaccaccacgcccagctaattttggatttttagtagagatggggtttcaccatgttggccaggctggtctcaaactcctgacctcaggtgtttcacctgcctcggcctcccaaagtgctgggattacaggcatgagccaccgcgcccagcccctttgtgcacttttaaaaacatatcttagaatttgtgatatatgttttattttcattttcatttggttcacaatatagtaaaatttctattatgacttactctttgacccatgatttgttttaaaacgtattgtttaattttcaaacatttagggatttcccagatatctttgttgttggtttctaatttgattccattatggttagagaccatacttggtatgatgaattaaaaaaaaaaatttagaggtttgtatatggcctgaaacattttttaggtgagtgttcagtttgtaataggaaagatgtgtcctgctgccgttaggtaaagtgtttcataagtaataattaggtcaagttggttgatcgtgttaaggtctgctctatccttgctgatttcctgtctgcttgttctagtgattactgagaaaggagtgttgaagtctacaacgattgttatgggtttgttctctttctccttgaaattctgtctgtttatgcgtcctgtattttgaggccctgttgttagatgcagaaacatttacagttttgtcctcttgatgattatttgacccctttatcattctgaaataacctttatttctggtaataatcattatactaaaaaccattatttggccaggcatggtggctcacgcctgtaatcccagcactttgggaggccaaggcgggtggatcacctgaggtcaggagttcaagaccagaccggccaacatggcgaaaccccgtctctactaaaaatagaaaaacagcctggtgtggtggcacacgtctgtagtcccagctacttagaaggttgaggcaagagaatcactggaatccaggtggtggatattgcagtgagctgagatcacaccactgcatcccagcctgggaagcagagcaagactccatctcaaataaatacatacatacaggccaggtgcggtgcctcacgcctgtaatcccagcactttgggaggccgaggagggtgaatcacctgaggtcaggagttcgagaccaacctggctaagatggtgaaaccccgtccctactaaaaatacaaaaatgagccaggcgcggtggcaggcacctgtaatcccaactacttgggaggctgaggcaggagaattgcttgaagccgggaggcagaggttgtagtgagccgagatcgtgccactgcactctagcctgggtaacagggcaagaccccgtcttgaaaacagacagacaaacaaaaaaccattatttaatactaatataaaattagtgttttatattagtaacataatactgtttttgactagtgttagaatgacatatctttccctacccttttgcttttaatctatatatcatgatattcgtttactttcaatttataaaaatagagatggggttttgccatgttgcccaggctggtcttgaattcctgggctcaaggcatctgcccacctcagcctcccaaaatgctgggattataggtgtgagccaccatgcctggccacatcattatattttcaaatggtttcttgttttttttatttttcttttaaatgtaatctgacagcatcttttaattaatgtgtgttggaccatttacatttaatacgattgataatgactggatttaggtttcctattttattatttgttttctgattatctcttttttggggggtttcttctgtttcttttttctgcctacttttggattaattgaatattttttagtgttttgttttattaaatggcttttggtcatatctgggctatgtttttgctgtaggaattacaaaatatacacctaacctacctacttagagttagccttttacctctaaatacaacgtcaaagtattgcaaccatataggtttctttattctagtccccctcccttataattgtatatgtgtgtgtgtgtgtgtgtgtgtgtatctatatacactttcaatgtatgtaggtatatagatatgtatctatactttcaatgtatatctacatgcatacattgtatatgtatgtagacatatatccacatacattgaaagatatatatctatatacatatacaatgcatgtatgatacctttggccactacatccttcttaaatttcctgttgccactcatgacccaatttccttgaccagttattcctccttcaaacatccctcttacatgtgatagtcctcagcatttagtttcctcaactttcccctaattatcagttgactcaattaccaccaaaatatcaatgacttctagatccattttcctacctagacctctcttctaaactccagttatgtatttcaactgcctatgttgtccccgataaactccacattgtaggaaataaaaagaaaggagttacaaaagttaggttcaaagcaaaatttaaaaactcctaaatgaaacaaagatctagtgatgataaaggctatggcccacaatgaagatataaaagtaatgaacctttctgtaaaacatgtgtgtgatagagccggtccccagctttaagcctttcagcgattcaagtaactgcagaacatctttaaagtactgagagaaatgtcaatccagaattctatatccagcaaaaatacccttcaacaattaaggcaaaaagaaaaaaaagacatttcagatgaagaaaatctaagagaatgtgttgtcagaagttctgctctaaaataaatgtataagcaggtctttaggccaaaggaaaattataccagtggtaatactagaacttcagagataaagaaagagcagcagaaatggtatctgggaaaattttaaaacacaaatggttgtttctcctcttacgctctttaaaatatgtatggtggttgaaagcacaagttagaaccctggtgagacttccaatgtatgtagatatagatagatagatagatagatagatacatatatctatatacatgtagaggtaataatggtagctattttatggagctgatctgaggataaaataagataatgcactttaaagtgctcagcacaatgtctggcaaatagcactctataggccaggcatggtggctcacacctgtaatcccagcactttgggaggcctaggtgggtggatcacttgaggtcaggaatttgagaccagcctggccaacatggtgagaccccatctctacaaaaaatataaaaattagccaggtgtggtggtggactcctgtaatcccagctacttgggagtgaggcaggcaagtggcttgaacctaggaggtggaggttgcagtgagccaagattgcaccactgcactccagcctgggcgacagagcgactctgtctcaaaaaaaagaaagcacctgtaaaagctagctggtgatttttatattattactgacacagaagatagggattgggggcaaatggaatgtactcaaagagcacagccttgttcagtaataatgttaataccagattgggacactattccacatcaaaaggtgaatccttgtaacatttgacaagtaagtttcataatttttaaaagatttcaatgcatcacagattattccttcttgatatgccattcatggtttatagatgtgtaatagcagattaaataattagattttattagttctggagtattaacttctgctggaaatgaacttcccccttccctataccaatattgagtgaggcctcttttctcagataccaattagaaacaaggggacaatgttacactttttccttctagaaacatacattatacagagagttgtcttttgaagtctagaagtctgaaaacactgtaattttttttaaagaattaatacaataaatgtatgggtcaactcggaaaaatctacaatggtttctgggatttaatcttggcatgactttacctctgcacctctgccctcggcgggtacttttgtttatgggtgtcattggttgaacaaatattgttttagttactaccataactgaaacatgatctgtgctctaaaggagtcaacaaatgagccaggggggcatgagtaattgcctgtaatataatcgtgctcacgctgtcatggaggaccgtacaaagtgtcagaagcacagcgccaggaggcacagcaaagggtagtagaggtgacatttgagcccggccttgaaaaccgtctaggatttctcagaatttcagcaaagtaagataatttctgtctaaaatatataggcaaactttttattaaaaatatgagaaattaattaaataacagattatgaccacaatgcagatttaaaacccaaggcatgatgagtgccgttgactagttcatccaaacagttcagagaagagaacatccatgtagatccttcttgtgttacagaatacaaaggaacagaaaattttgcctcagtaactgccaggtcattctaattaaagtacctatacattgtaatataattcctccattaaggtaataaccgatcaggtggtccagagtctgtgtcattcagtcaagaaattcactcccttaacctggggctgtgctggaaattcattgacaaattttggtctttggttctccgtttttcttcagaattcatgcagaccacttgacttccttagcattttcttttgtaggcgtatattaatgtccgtggttaagctttggcttccgtttgcatcaatcctgttgtaatcgtgcctcctgaggcatctttttgcttcccttgcatgagtttccaaaatcctactttccacttggtaaggggagtatccattttcttgaacgcagtggttttcaaacttgcctgcacatcagaattatttggggagaaggataaaaatacagactactgagcttcacctgggattctgtaaatttgggttgcatttgagatgacttttaacaatttaccagatgatttttgctgcacctccacttcagttttaggaaggactgtttcaaggcagcttttcaaactttcatgaccatagaaatcacctgaagattgtgagaaactgcagatcctaatttagtaggcctgggtttaggcctgtgattctgaatttctctcaaatgtgatagtatcaatcccttgttgagtagcaaggttgtttcttgtttttttcttttgtttccaggatcttcatgacattcaatgagtagcaaaatttgaagataacttctggaatttcatctaatgtgtactcatctggatcttaggggaaataacctatcaggttatagggaaggaggacctttaataaccaagctaaatgtgtgggctgtttacctctccctcttatgcaaaggtatcccttgcacacactgaaaacttcatagaccaaaagcattatagctctagtttgccttgaaggaagttgtattgtctgtagagcatgtgggccattttctgccaataaaatgttcaaatgttctctctctccgaagctttgttcactgtgtctggtggaattttggttctcagggagtagatgatacctagccatgcttctaatgtgaagtgtctaccagcccatggtctctattttggatttgaacttacttcgaccccccacctgatgccttaccatttaatcatattgtgattgaacatttttgtgtccacatttttcatttcttatgttattattccttagttcttatctgtaagatcataaagtcctttgaaccaaacacagttgatatttcatacatacgttaaaaactgagctgtgagaccggacatggtgacccacgcctgaaatctcagcaattggggaggccaagacagaaggatcacttcaagctaggagttcgagaccagcctgggcaacaaagcaggaccatgtctctaaaaaagagaattagccgggcagaggggagtagtccctgctactctggaggctgaggcaagaagatcacttgagcccaggaattccaggctgcagtgagctatgatagtgccactgcacttcagcctgggtgacagagtgagacccagtctccaaaaaaaacagaaaacaaacaaaaaaacgaagcatatgatgaggaaacttccaggaaaatgctcttattttctgcttttagaaaccaaaagaatgtctcattgtggggtgctaccattatattcaggaagttttagaatgaaaaagattctgaattgatacttgcttactttatttcagaaagtggtaaaatagctgtggagtgcagacccagtgaagagattgtagatgtcagatgggaagaactacacagtttaattcaagtatgtggagataaaaactcaaaggtaacatggctgggcgcagtggctcacacctgtaatgccagtgctttgggaggccaaggcgggtggatcacctaaggttgggagttcaagaccagcctgaccaacatgggggaaacggtggtgcatgcatcccagctactctggaggctgaggcaggagaatcgcttgaaccaaggaggtggaggttgtggtgagccaagatcatgtcattgcactccagcctgggcgacaagagcgaaactccatctcaaaaaacaaacaaaacaaaactcaagggtcagataacatagccagtgtaaccataattcaaaacaagcagcagaatttggaggataatttgtttcattctcaggaaaatgtgaaactctgaaactgctttttgagtgcagggtatttctggggcttttcctaaagtcttgacccttggttctgaccccttatttgaagtttggagagcaaaactgaggactgtattactacagttgtggacacaggagaggggttagtctcccccggccccaggagtaagggatgctgggctgcttgaacacaggcctttttagaactcccttcaaacaagataccagagatgtggggggaatgtaactggccttaagactgattgtgctacagctttcaaaaactataatgcctttcaaatgtggcttactgcttggatctcattatctcccgtataccttgggtggactattttgctgaagatctttctgtcaatcatttacaatcacgtgctgcaaaatgaggtttcggtcaacaatagaccacatacatgatggtggttccataggagtataaaggagctctccctacacaggcataccatttttatctttgttgttgttgttgttatggagtctcactctgtggcccaggctggagtgcgatggcacgatctcagctcactgcaacctctacctcctgggttcaagtgattctcctacctcagcctcctgagtagctgggattataggcacgcaccaccatactcagctgatttttgtatttttaggagagactgtttttcgccatgttggccagactggtctcgaactcctgacctcaggtgatccacccacctctgcatcccaaagtgctgggattacaggtgcgagccgctgcgcctgggccccattgttatcatttatacagtattttaactacaccttttccatgtttatatacacaaatacctgccattgtgttacagttgcctttaatattcagtacagtaacatacagtacaggtttgtagcctaggctataccgcatagcctaggtatgctgtaggctacaccacctatgtttgtgtaagtatacactatgatgttagcacaatggtgaaatcacctgacacatttctcaagctcttcacatggcaagcaatgcatgactgcatatgaaagctcttaaatagggattaaatttctaaattaatctcaaaagaaaacagtaattatttactatttatggatttttttttaaaaagggagcaaaagtttcatttcaatgggaacttaatttggggctagagtgttttatttaactttcactccaaagttgcaaagtgttttgaagtttttccctgtaaaataattattttaattcaatttaaatcaaacccaccaaggaaacttccagctttaagaagtctagcttcctgtgaaatgtgagaggaagttagcactgatttcagaaatctgattataacaatagatccatccctaaatgaggcgaatcttggaatcccttcaattttattttatttttttgagacggagtttctctcttgttgcccaggctggagggcaatgttgcgatctcggctcactgcaacctctgcctcccagattcaagggattctcctgcctcctgagtagctgggattacaggcatgcaccaccacgcctggctaattttgtatttttagtagagacggagtttcagcatgttgatcaggctggtctggaacttctgacctcagtgatccacccacctcggcctcccagagttctgggattatgggtgtgagccactgtgcacagccccccttcaattttaaaaccatcactatgcaccccgtgcctgtgctaggcactggaagaagatgaagctccttcttggggtttacatgctgataattgtgccagacagtaataaaataggtaagggctgtgggggaagtcagctgggttctagttatagtcgcatttcaggaaatgatttaacatgctgactttaacaacctaagcctcttctccatgtgtgcacacagggtagatctctgaagggtggcgctgtaacttcgagggtaatggctgtgttgagttaaggcaggatgacagttcagcctcctcccaggctggtgcaaagggctgttccctcggattgaagccttctctcccagactgaattgcccacccccaacacccctcctacagaaaatctggagtcctcgcttattccctggcagcccctacctaatagggtggtgaattaattatcaaacatgcgacagtttagcgaaaacggcaacattttggaataaatgactgtaacgcgcgtcctgcctgccaccctaactggcgcccattttgcaggtcagttgctctcccctgaaggaagagtattctcggatttcacctcagaggaggaagaattcaggctgccagaactggactagcacttctgaagatcccaaggccaggtcccgtgacttccttgggaagctctgccgtgcccccaccccaccccaccccaccacagcaggccgctggagtcctgggaccaccccggtctgcggcccaaatccttcctcactaaggggaggggaggggtgttccggcctggcggggtgggaaggggcgcttgggcgggattgtgacataaggttgccctggtaacatggaacagatctggacccaagcctaataaaggtgacataaataaaggtgtcataaagacagggcatggcacacgcttataaggggcatgagcatctcagggctgccagaatggcttttgctgagtgcatagcaccagcgtgtgtcatgtcttggctgcgtttctggggcccatggcccctccttacgtggcaactattgtctttactagtcaaggaggctcagcctctggtgtgggtcaaggacccgctccagctgacctctaaccccctggggccacctgagccctggtcttcccgctcctcccatctcccatgggaatctccccatgcacctgctcccccagcagccccgggggactttgattacctggggccctctgcttcttcgcagatgtcagccctgcctcaggaaccaactgaaaatttggctccattcctgaaggaattggattcagctggagagctgcccctggggccagagccgttcttggctgcacatcaggacttaaatgacaagcggactccagaagaaaggctcccagaggtggttccgcttctcaaccgggatcagaaccaggccctagttcagcttcctcgcctcaagtgggttcaaactacagatctagatcgggctgcaggtcatcaggcagatgaaatacttgttccactagacagtaaggtttcaagaccaaccaaatttgttgtttcgcccaagaacctgaagaaagatctagctgaacgttggagccttcctgagattgttgggattccacaccaattatccaaacctcagcgtcagaaacagactttgccagatgattatttgagtatggacacactgtatcccggcagcctacctccagaactccgggtgaacgcagatgagcctccagggcctcctgagcaagttggactttctcaattccatctagagcccaaaagtcaaaatccagagacccttgaagacatccagtcctcttcactccaggaagaagccccagcgcagcttctacagctccctcaggaggtagaaccttcaacccagcaggaggccccagctctgcctccagagtcctctatggagagtctagctcaaactccact
